(19) United States
(12) Patent Application Publication
(10) Pub. No.: US 2016/0102331 A1
(43) Pub. Date: Apr. 14, 2016

(54) EXTRACELLULAR DITERPENE PRODUCTION

(71) Applicant: DSM IP ASSETS B.V., Heerlen (NL)

(72) Inventors: Viktor Marius BOER, Echt (NL); Nicolette Jasmijn BROERS, Echt (NL); Adam G. LAWRENCE, Echt (NL)

(21) Appl. No.: 14/893,284

(22) PCT Filed: Jun. 2, 2014
(86) PCT No.: PCT/EP2014/061398

§ 371 Date: Nov. 23, 2015

Related U.S. Application Data
(63) Continuation of application No. 13/907,786, filed on May 31, 2013, now abandoned.

(51) Int. Cl. C12P 19/56; C12N 9/90; A23L 2/60; C12N 9/02; A23L 1/236; A23K 1/16; C07H 15/256; C12N 9/88

(52) U.S. Cl. CPC C12P 19/56; C07H 15/256; C12N 9/90; C12N 9/88; C12N 9/0073; A23L 1/2366; A23K 1/1609; A23L 2/60; C12Y 114/13078; C12Y 114/13; C12Y 402/03019; C12Y 505/01013; A23V 2002/00

(57) ABSTRACT

The present invention relates to a method for the production of a diterpene or a glycosylated diterpene, which method comprises: a. fermenting a recombinant microorganism in a suitable fermentation medium, wherein the microorganism comprises one or more nucleotide sequence(s) encoding: a polypeptide having ent-copalyl pyrophosphate synthase activity; a polypeptide having ent-Kaurene synthase activity; a polypeptide having ent-Kaurene oxidase activity; and a polypeptide having kaurenoic acid 13-hydroxylase activity and whereby expression of the nucleotide sequence(s) confer(s) on the microorganism the ability to produce at least steviol, whereby a diterpene or glycosylated diterpene is produced extracellularly in the fermentation medium; and b. recovering the diterpene or glycosylated diterpene from the fermentation medium.

### FIELD OF THE INVENTION

[0001] The present invention relates to a process for the production of a diterpene and/or a glycosylated diterpene using a recombinant microorganism. The invention further relates to a fermentation broth comprising a diterpene and/or glycosylated diterpene obtainable by such a process.

### BACKGROUND TO THE INVENTION

[0002] The worldwide demand for high potency sweeteners is increasing and, with blending of different artificial sweeteners, becoming a standard practice. However, the demand for alternatives is expected to increase. The leaves of the perennial herb, Stevia rebaudiana Bert., accumulate quantities of intensely sweet compounds known as steviol glycosides. Whilst the biological function of these compounds is unclear, they have commercial significance as alternative high potency sweeteners, with the added advantage that Stevia sweeteners are natural plant products.

[0003] These sweet steviol glycosides have functional and sensory properties that appear to be superior to those of many high intensity sweeteners. In addition, studies suggest that stevioside can reduce blood glucose levels in Type II diabetics and can reduce blood pressure in mildly hypertensive patients.

[0004] Steviol glycosides accumulate in Stevia leaves where they may comprise from 5 to 20% of the leaf dry weight. Stevioside and rebaudioside A are both heat and pH stable and suitable for use in beverages and many other foods. Stevioside is between 110 and 270 times sweeter than sucrose, rebaudioside A between 150 and 320 times sweeter than sucrose. In addition, rebaudioside D with a better taste profile is also a high-potency diterpene glycoside sweetener which accumulates in Stevia leaves. It may be about 200 times sweeter than sucrose

[0005] Currently, steviol glycosides are extracted from the Stevia plant. In Stevia, (−)-kaurenoic acid, an intermediate in gibberellic acid (GA) biosynthesis, is converted into the tetracyclic dipterepene steviol, which then proceeds through a multi-step glucosylation pathway to form the various steviol glycosides. However, yields may be variable and affected by agriculture and environmental conditions. Also, Stevia cultivation requires substantial land area, a long time prior to harvest, intensive labour and additional costs for the extraction and purification of the glycosides.

[0006] New, more standardized, clean single composition, no after-taste, sources of glycosides are required to meet growing commercial demand for high potency, natural sweeteners.

### SUMMARY OF THE INVENTION

[0007] In Stevia, steviol is synthesized from GGPP, which is formed by the deoxyxylulose 5-phosphate pathway. The activity of two diterpene cyclases (−)-copalyl diphosphate synthase (CPS) and (−)-kaurene synthase (KS) results in the formation of (−)-Kaurene which is then oxidized in a three step reaction by (−)-kaurene oxidase (KO) to form (−)-kaurenoic acid.

[0008] In Stevia leaves, (−)-kaurenoic acid is then hydroxylated, by ent-kaurenoic acid 13-hydroxylase (KAH) to form steviol. Steviol is then glucosylated by a series of UDP-glucosyltransferases (UGTs).

[0009] This invention relates to a process for the extracellular production of a diterpene or a glycosylated diterpene using a microorganism which is capable of producing a diterpene, such as steviol, or a glycosylated diterpene (i.e. a diterpene glycoside), such as steviolmonoside, steviolbioside, stevioside, rebaudioside A, rebaudioside B, rebaudioside C, rebaudioside D, rebaudioside E, rebaudioside F, rubusoside or dulcoside A.

[0010] According to the invention, there is thus provided method for the production of a diterpene or a glycosylated diterpene, which method comprises:
[0011] a. fermenting a recombinant microorganism in a suitable fermentation medium,
[0012] wherein the microorganism comprises one or more nucleotide sequence(s) encoding: a polypeptide having ent-copalyl pyrophosphate synthase activity; a polypeptide having ent-Kaurene synthase activity; a polypeptide having ent-Kaurene oxidase activity; and a polypeptide having kaurenoic acid 13-hydroxylase activity and whereby expression of the nucleotide sequence(s) confer(s) on the microorganism the ability to produce at least steviol,
[0013] whereby a diterpene or glycosylated diterpene isexcreted/secreted/transported outside the cell and produced extracellularly in the fermentation medium; and
[0014] b. recovering the diterpene or glycosylated diterpene from the fermentation medium.

[0015] That is to say, the process of the invention is a process for extracellular production of a diterpene or a glycosylated diterpene. A diterpene or a glycosylated diterpene is excreted into the fermentation medium by the production host microorgamism and then physically and/or chemically recovered from the fermentation medium. Accordingly, recovery of a diterpene or a glycosylated diterpene is simplified and made economically viable in comparison with a process that requires recovery of those compounds from the recombinant microorganism itself, producing and accumulating steviol glycosides intracellularly either partially for fully.

[0016] In a process of the invention, the recombinant microorganism may comprise one or more nucleotide sequence(s) encoding one or more polypeptides having UDP-glucosyltransferase activity (UGT),
[0017] whereby expression of the nucleotide sequence confers on the microorganism the ability to produce at least one of steviolmonoside, steviolbioside, stevioside, rebaudioside A, rebaudioside B, rebaudioside C, rebaudioside D, rebaudioside E, rebaudioside F, rubusoside or dulcoside A.

[0018] According to the invention, there is also provided:

[0019] a fermentation broth comprising a diterpene or glycosylated diterpene obtainable by the process of the invention;

[0020] a diterpene or glycosylated diterpene obtained by a process of the invention or obtainable from a fermentation broth of the invention;

[0021] a foodstuff, feed or beverage which comprises a diterpene or glycosylated diterpene of the invention; and

[0022] use of a recombinant microorganism as defined above in the extracellular production of a diterpene or glycosylated diterpene.

### BRIEF DESCRIPTION OF THE DRAWINGS

[0023] FIG. 1 sets out a schematic representation of the plasmid pUG7-EcoRV.

[0024] FIG. 2 sets out a schematic representation of the method by which the ERG20, tHMG1 and BTS1 over-expression cassettes are designed (A) and integrated (B) into the yeast genome. (C) shows the final situation after removal of the KANMX marker by the Cre recombinase.

[0025] FIG. 3 sets out a schematic representation of the ERG9 knock down construct. This consists of a 500 bp long 3′ part of ERG9, 98 bp of the TRP1 promoter, the TRP1 open reading frame and terminator, followed by a 400 bp long downstream sequence of ERG9. Due to introduction of a Xbal site at the end of the ERG9 open reading frame the last amino acid changes into Ser and the stop codon into Arg. A new stop codon is located in the TPR1 promoter, resulting in an extension of 18 amino acids.

[0026] FIG. 4 sets out a schematic representation of how UGT2 is integrated into the genome. A. different fragments used in transformation; B. situation after integration; C. situation after expression of Cre recombinase).

[0027] FIG. 5 sets out a schematic representation of how the pathway from GGPP to RebA is integrated into the genome. A. different fragments used in transformation; B. situation after integration.

[0028] FIG. 6 sets out a schematic representation of the plasmid MB6754.

[0029] FIG. 7 sets out a schematic representation of the plasmid MB6761.

[0030] FIG. 8 sets out a schematic representation of the plasmid MB6762.

[0031] FIG. 9 sets out a schematic representation of the plasmid MB6775.

[0032] FIG. 10 sets out a schematic diagram of the potential pathways leading to biosynthesis of steviol glycosides.

[0033] FIG. 11 sets out a schematic diagram of removal of the UGT2 gene from STV040.

### DESCRIPTION OF THE SEQUENCE LISTING

[0034] A description of the sequences is set out in Table 1. Sequences described herein may be defined with reference to the sequence listing or with reference to the database accession numbers also set out in Table 1.

### DETAILED DESCRIPTION OF THE INVENTION

[0035] Throughout the present specification and the accompanying claims, the words “comprise”, “include” and “having” and variations such as “comprises”, “comprising”, “includes” and “including” are to be interpreted inclusively. That is, these words are intended to convey the possible inclusion of other elements or integers not specifically recited, where the context allows.

[0036] The articles “a” and “an” are used herein to refer to one or to more than one (i.e. to one or at least one) of the grammatical object of the article. By way of example, “an element” may mean one element or more than one element.

[0037] We have shown that a recombinant microorganism as described herein is capable of producing a diterpene or glycosylated diterpene preferentially produces said diterpene or glycosylated diterpene extracellularly. Accordingly, the invention relates to a process for the extracellular production of a diterpene or a glycosylated diterpene which method comprises the use of a recombinant microorganism. The process of the invention is typically a fermentation process in which the recombinant microorganism produces a diterpene or glycosylated diterpene extracellularly, i.e. a diterpene or a glycosylated diterpene produced and is excreted and is present in the fermentation broth. This, diterpene or glycosylated diterpene may be recovered directly form the fermentation broth and there is thus no expensive necessity to recover such compounds from the recombinant microorganism (intracellularly) itself. The recombinant microorganism used in the process is one that is capable of producing a diterpene or a glycosylated diterpene, typically steviol or a steviol glycoside respectively.

[0038] There are specific advantages over the prior art in making and/or choosing a recombinant microorganism producing steviol glycosides extracellularly such as i) making an economically viable product, ii) making manufacturing process that is simpler and scalable, iii) product not to be purified from intracellular materials including DNA and proteins that may influence products sensory profile. It is to be emphasized that this invention teaches making fermentative diterpenes such as steviol glycosides production a commercial reality over known production processes. In particular, the recombinant microorganism may be a microorganism of the genus Yarrowia or Candida.

[0039] For the purposes of this invention, a diterpene typically means an organic compound composed of four isoprene units. Such a compound may be derived from geranylgeranyl pyrophosphate. A glycosylated diterpene or diterpene glycoside is a diterpene in which a sugar is bound, typically to a non-carbohydrate moiety. Typically, in a diterpene glycoside, the sugar group may be bonded through its anomeric carbon to another group via a glycosidic bond. A preferred diterpene and diterpene glycoside is steviol and steviol glycoside respectively. Thus, in particular, the invention relates to a recombinant microorganism which is capable of producing steviol or a steviol glycoside.

[0040] According to the invention, there is provided a method for the extracellular production of a diterpene or a glycosylated diterpene, which method comprises:

[0041] a. fermenting a recombinant microorganism in a suitable fermentation medium,

[0042] wherein the microorganism comprises one or more nucleotide sequence(s) encoding:

[0043] a polypeptide having ent-copalyl pyrophosphate synthase activity;

[0044] a polypeptide having ent-Kaurene synthase activity;

[0045] a polypeptide having ent-Kaurene oxidase activity; and

[0046] a polypeptide having kaurenoic acid 13-hydroxylase activity and whereby expression of the nucleotide sequence(s) confer(s) on the microorganism the ability to produce at least steviol,

[0047] whereby a diterpene or glycosylated diterpene is produced extracellularly in the fermentation medium; and

[0048] b. recovering the diterpene or glycosylated diterpene from the fermentation medium.

[0049] The recombinant microorganism used in the invention may be one of the genus Yarrowia, for example Yarrowia lipolytica or one of the genus Candida, such as Candia lipolytica. Where the recombinant microorganism is Yarrowia, such as Yarrowia lipolytica, the glycosylated diterpene may preferentially be rebaudioside A or rebaudioside D. The recombinant microorganism used in the invention may be one of the genus Saccharomyces, for example Saccharomyces cerevisiae. Where the recombinant microorganism is Saccharomyces, such as Saccharomyces cerevisiae, the glycosylated diterpene may preferentially be rubusoside or rebaudioside D.

[0050] The recombinant microorganism used in the invention comprises one or more nucleotide sequence(s) encoding:
[0051] a polypeptide having ent-copalyl pyrophosphate synthase activity;
[0052] a polypeptide having ent-Kaurene synthase activity;
[0053] a polypeptide having ent-Kaurene oxidase activity; and
[0054] a polypeptide having kaurenoic acid 13-hydroxylase activity,

[0055] whereby expression of the nucleotide sequence(s) confer(s) on the microorganism the ability to produce at least steviol

[0056] For the purposes of this invention, a polypeptide having ent-copalyl pyrophosphate synthase (EC 5.5.1.13) is capable of catalyzing the chemical reation:

[chemical structure]

[0057] This enzyme has one substrate, geranylgeranyl pyrophosphate, and one product, ent-copalyl pyrophosphate. This enzyme participates in gibberellin biosynthesis. This enzyme belongs to the family of isomerase, specifically the class of intramolecular lyases. The systematic name of this enzyme class is ent-copalyl-diphosphate lyase (decyclizing). Other names in common use include having ent-copalyl pyrophosphate synthase, ent-kaurene synthase A, and ent-kaurene synthetase A.

[0058] For the purposes of this invention, a polypeptide having ent-kaurene synthase activity (EC 4.2.3.19) is a polypeptide that is capable of catalyzing the chemical reaction:

ent-copalyl diphosphate [symbol] ent-kaurene+diphosphate

[0059] Hence, this enzyme has one substrate, ent-copalyl diphosphate, and two products, ent-kaurene and diphosphate.

[0060] This enzyme belongs to the family of lyases, specifically those carbon-oxygen lyases acting on phosphates. The systematic name of this enzyme class is ent-copalyl-diphosphate diphosphate-lyase (cyclizing, ent-kaurene-forming). Other names in common use include ent-kaurene synthase B, ent-kaurene synthetase B, ent-copalyl-diphosphate diphosphate-lyase, and (cyclizing). This enzyme participates in diterpenoid biosynthesis.

[0061] ent-copalyl diphosphate synthases may also have a distinct ent-kaurene synthase activity associated with the same protein molecule. The reaction catalyzed by ent-kaurene synthase is the next step in the biosynthetic pathway to gibberellins. The two types of enzymic activity are distinct, and site-directed mutagenesis to suppress the ent-kaurene synthase activity of the protein leads to build up of ent-copalyl pyrophosphate.

[0062] Accordingly, a single nucleotide sequence used in the invention may encode a polypeptide having ent-copalyl pyrophosphate synthase activity and ent-kaurene synthase activity. Alternatively, the two activities may be encoded two distinct, separate nucleotide sequences.

[0063] For the purposes of this invention, a polypeptide having ent-kaurene oxidase activity (EC 1.14.13.78) is a polypeptide which is capable of catalysing three successive oxidations of the 4-methyl group of ent-kaurene to give kaurenoic acid. Such activity typically requires the presence of a cytochrome P450.

[0064] For the purposes of the invention, a polypeptide having kaurenoic acid 13-hydroxylase activity (EC 1.14.13) is one which is capable of catalyzing the formation of steviol (ent-kaur-16-en-13-ol-19-oic acid) using NADPH and O₂. Such activity may also be referred to as ent-ka 13-hydroxylase activity.

[0065] A recombinant microorganism for use in the method of the invention may comprise one or more nucleotide sequences encoding a polypeptide having UDP-glucosyltransferase (UGT) activity, whereby expression of the nucleotide sequence(s) confer(s) on the microorganism the ability to produce at least one of steviolmonoside, steviolbioside, stevioside or rebaudioside A, rebaudioside B, rebaudioside C, rebaudioside D, rebaudioside E, rebaudioside F, rubusoside, dulcoside A.

[0066] For the purposes of this invention, a polypeptide having UGT activity is one which has glycosyltransferase activity (EC 2.4), i.e. that can act as a catalyst for the transfer of a monosaccharide unit from an activated nucleotide sugar (also known as the “glycosyl donor”) to a glycosyl acceptor molecule, usually an alcohol. The glycosyl donor for a UGT is typically the nucleotide sugar uridine diphosphate glucose (uracil-diphosphate glucose, UDP-glucose).

[0067] The UGTs used may be selected so as to produce a desired diterpene glycoside, such as a steviol glycoside. Schematic diagrams of steviol glycoside formation are set out in Humphrey et al., Plant Molecular Biology (2006) 61: 47-62 and Mohamed et al., J. Plant Physiology 168 (2011) 1136-1141. In addition, FIG. 10 sets out a schematic diagram of steviol glycoside formation.

[0068] The biosynthesis of rebaudioside A involves glucosylation of the aglycone steviol. Specifically, rebaudioside A can be formed by glucosylation of the 13-OH of steviol which forms the 13-O-steviolmonoside, glucosylation of the C-2′ of the 13-O-glucose of steviolmonoside which forms steviol-1,2-bioside, glucosylation of the C-19 carboxyl of steviol-1,2-bioside which forms stevioside, and glucosylation of the C-3′ of the C-13-O-glucose of stevioside. The order in which each glucosylation reaction occurs can vary—see FIG. 10. One UGT may be capable of catalyzing more than one conversion as set out in this scheme.

[0069] Conversion of steviol to rebaudioside A or rebaudioside D may be accomplished in a recombinant host by the expression of gene(s) encoding the following functional UGTs: UGT74G1, UGT85C2, UGT76G1 and UGT2. Thus, a recombinant microorganism for use in the method of the invention which expresses these four UGTs can make rebaudioside A if it produces steviol or when fed steviol in the medium. Typically, one or more of these genes are recombinant genes that have been transformed into a microorganism that does not naturally possess them. Examples of all of these enzymes are set out in Table 1. A microorganism of the invention may comprise any combination of a UGT74G1, UGT85C2, UGT76G1 and UGT2. In Table 1 UGT64G1 sequences are indicated as UGT1 sequences, UGT74G1 sequences are indicated as UGT3 sequences and UGT76G1 sequences are indicated as UGT4 sequences. UGT2 sequences are indicated as UGT2 sequences in Table 1.

[0070] A recombinant microorganism suitable for use in the invention which comprises a nucleotide sequence encoding a polypeptide having UGT activity may comprise a nucleotide sequence encoding a polypeptide capable of catalyzing the addition of a C-13-glucose to steviol. That is to say, a microorganism suitable for use in a method of the invention may comprise a UGT which is capable of catalyzing a reaction in which steviol is converted to steviolmonoside. Accordingly, expression of such a nucleotide sequence may confer on the microorganism the ability to produce at least steviolmonoside.

[0071] Such a microorganism may comprise a nucleotide sequence encoding a polypeptide having the activity shown by UDP-glycosyltransferase (UGT) UGT85C2, whereby the nucleotide sequence upon transformation of the microorganism confers on the cell the ability to convert steviol to steviolmonoside.

[0072] UGT85C2 activity is transfer of a glucose unit to the 13-0H of steviol. Thus, a suitable UGT85C2 may function as a uridine 5′-diphospho glucosyl: steviol 13-0H transferase, and a uridine 5′-diphospho glucosyl: steviol-19-O-glucoside 13-0H transferase. A functional UGT85C2 polypeptide may also catalyze glucosyl transferase reactions that utilize steviol glycoside substrates other than steviol and steviol-19-O-glucoside. Such sequences are indicated as UGT1 sequences in Table 1.

[0073] A recombinant microorganism for use in a method of the invention which comprises a nucleotide sequence encoding a polypeptide having UGT activity may comprise a nucleotide sequence encoding a polypeptide capable of catalyzing the addition of a C-13-glucose to steviol or steviolmonoside. That is to say, a suitable microorganism may comprise a UGT which is capable of catalyzing a reaction in which steviolmonoside is converted to steviolbioside. Accordingly, such a microorganism may be capable of converting steviolmonoside to steviolbioside. Expression of such a nucleotide sequence may confer on the microorganism the ability to produce at least steviolbioside.

[0074] A microorganism suitable for use in a method of the invention may also comprise a nucleotide sequence encoding a polypeptide having the activity shown by UDP-glycosyltransferase (UGT) UGT74G1, whereby the nucleotide sequence upon transformation of the microorganism confers on the cell the ability to convert steviolmonoside to steviolbioside.

[0075] A microorganism suitable for use in a method of the invention may also comprise a nucleotide sequence encoding a polypeptide having the activity shown by UDP-glycosyltransferase (UGT) UGT2, whereby the nucleotide sequence upon transformation of the microorganism confers on the cell the ability to convert steviolmonoside to steviolbioside.

[0076] A suitable UGT2 polypeptide functions as a uridine 5′-diphospho glucosyl: steviol-13-O-glucoside transferase (also referred to as a steviol-13-monoglucoside 1,2-glucosylase), transferring a glucose moiety to the C-2′ of the 13-0-glucose of the acceptor molecule, steviol-13-O-glucoside. Typically, a suitable UGT2 polypeptide also functions as a uridine 5′-diphospho glucosyl: rubusoside transferase transferring a glucose moiety to the C-2′ of the 13-O-glucose of the acceptor molecule, rubusoside.

[0077] Functional UGT2 polypeptides may also catalyze reactions that utilize steviol glycoside substrates other than steviol-13-0-glucoside and rubusoside, e.g., functional UGT2 polypeptides may utilize stevioside as a substrate, transferring a glucose moiety to the C-2′ of the 19-O-glucose residue to produce Rebaudioside E. A functional UGT2 polypeptides may also utilize Rebaudioside A as a substrate, transferring a glucose moiety to the C-2′ of the 19-O-glucose residue to produce Rebaudioside D. However, a functional UGT2 polypeptide typically does not transfer a glucose moiety to steviol compounds having a 1,3-bound glucose at the C-13 position, i.e., transfer of a glucose moiety to steviol 1,3-bioside and 1,3-stevioside does not occur. Functional UGT2 polypeptides may also transfer sugar moieties from donors other than uridine diphosphate glucose. For example, a functional UGT2 polypeptide may act as a uridine 5′-diphospho D-xylosyl: steviol-13-O-glucoside transferase, transferring a xylose moiety to the C-2′ of the 13-O-glucose of the acceptor molecule, steviol-13-O-glucoside. As another example, a functional UGT2 polypeptide can act as a uridine 5′-diphospho L-rhamnosyl: steviol-13-O-glucoside transferase, transferring a rhamnose moiety to the C-2′ of the 13-O-glucose of the acceptor molecule, steviol-13-O-glucoside. Such sequences are indicated as UGT2 sequences in Table 1.

[0078] A recombinant microorganism suitable for use in a method of the invention which comprises a nucleotide sequence encoding a polypeptide having UGT activity may comprise a nucleotide sequence encoding a polypeptide capable of catalyzing the addition of a C-19-glucose to steviolbioside. That is to say, such a microorganism may comprise a UGT which is capable of catalyzing a reaction in which steviolbioside is converted to stevioside. Accordingly, such a microorganism may be capable of converting steviolbioside to stevioside. Expression of such a nucleotide sequence may confer on the microorganism the ability to produce at least stevioside.

[0079] A microorganism suitable for use in a method of the invention may also comprise a nucleotide sequence encoding a polypeptide having the activity shown by UDP-glycosyltransferase (UGT) UGT74G1, whereby the nucleotide sequence upon transformation of the microorganism confers on the cell the ability to convert steviolbioside to stevioside.

[0080] Suitable UGT74G1 polypeptides may be capable of transferring a glucose unit to the 13-OH or the 19-COOH, respectively, of steviol. A suitable UGT74G1 polypeptide may function as a uridine 5′-diphospho glucosyl: steviol 19-COOH transferase and a uridine 5′-diphospho glucosyl: steviol-13-O-glucoside 19-COOH transferase. Functional UGT74G1 polypeptides also may catalyze glycosyl transferase reactions that utilize steviol glycoside substrates other than steviol and steviol-13-O-glucoside, or that transfer sugar moieties from donors other than uridine diphosphate glucose. Such sequences are indicated as UGT1 sequences in Table 1.

[0081] A recombinant microorganism suitable for use in a method of the invention which comprises a nucleotide sequence encoding a polypeptide having UGT activity may comprise a nucleotide sequence encoding a polypeptide capable of catalyzing glucosylation of the C-3′ of the glucose at the C-13 position of stevioside. That is to say, such a microorganism may comprise a UGT which is capable of catalyzing a reaction in which stevioside to rebaudioside A. Accordingly, such a microorganism may be capable of converting stevioside to rebaudioside A. Expression of such a nucleotide sequence may confer on the microorganism the ability to produce at least rebaudioside A.

[0082] A microorganism suitable for use in a method of the invention may also comprise a nucleotide sequence encoding a polypeptide having the activity shown by UDP-glycosyltransferase (UGT) UGT76G1, whereby the nucleotide sequence upon transformation of the microorganism confers on the cell the ability to convert stevioside to rebaudioside A.

[0083] A suitable UGT76G1 adds a glucose moiety to the C-3′ of the C-13-O-glucose of the acceptor molecule, a steviol 1,2 glycoside. Thus, UGT76G1 functions, for example, as a uridine 5′-diphospho glucosyl: steviol 13-0-1,2 glucoside C-3 ‘ glucosyl transferase and a uridine 5’-diphospho glucosyl: steviol-19-0-glucose, 13-0-1,2 bioside C-3′ glucosyl transferase. Functional UGT76G1 polypeptides may also catalyze glucosyl transferase reactions that utilize steviol glycoside substrates that contain sugars other than glucose, e.g., steviol rhamnosides and steviol xylosides. Such sequences are indicated as UGT4 sequences in Table 1.

[0084] A microorganism suitable for use in a method of the invention may comprise nucleotide sequences encoding polypeptides having one or more of the four UGT activities described above. Preferably, a microorganism of the invention may comprise nucleotide sequences encoding polypeptides having all four of the UGT activities described above. A given nucleic acid may encode a polypeptide having one or more of the above activities. For example, a nucleic acid encode for a polypeptide which has two, three or four of the activities set out above. Preferably, such a recombinant microorganism of the invention comprises UGT1, UGT2 and UGT3 activity. More preferably, such a recombinant microorganism will also comprise UGT4 activity.

[0085] A microorganism suitable for use in a method of the invention which comprises a nucleotide sequence encoding a polypeptide having UGT activity may comprise a nucleotide sequence encoding a polypeptide capable of catalyzing the glucosylation of stevioside or rebaudioside A. That is to say, such a microorganism may comprise a UGT which is capable of catalyzing a reaction in which stevioside or rebaudioside A is converted to rebaudioside D. Accordingly, such a microorganism may be capable of converting stevioside or rebaudioside A to rebaudioside D. Expression of such a nucleotide sequence may confer on the microorganism the ability to produce at least rebaudioside D. We have shown that a microorganism expression a combination of UGT85C2, UGT2, UGT74G1 and UGT76G1 polypeptides may be capable of rebaudioside D production.

[0086] A microorganism suitable for use in a method of the invention which comprises a nucleotide sequence encoding a polypeptide having UGT activity may comprise a nucleotide sequence encoding a polypeptide capable of catalyzing the glucosylation of stevioside. That is to say, such a microorganism may comprise a UGT which is capable of catalyzing a reaction in which stevioside is converted to rebaudioside E. Accordingly, such a microorganism may be capable of converting stevioside to rebaudioside E. Expression of such a nucleotide sequence may confer on the microorganism the ability to produce at least rebaudioside E.

[0087] A microorganism suitable for use in a method of the invention which comprises a nucleotide sequence encoding a polypeptide having UGT activity may comprise a nucleotide sequence encoding a polypeptide capable of catalyzing the glucosylation of rebaudioside E. That is to say, such a microorganism may comprise a UGT which is capable of catalyzing a reaction in which rebaudioside E is converted to rebaudioside D.

[0088] Accordingly, such a microorganism may be capable of converting stevioside or rebaudioside A to rebaudioside D. Expression of such a nucleotide sequence may confer on the microorganism the ability to produce at least rebaudioside D.

[0089] A recombinant microorganism suitable for use in a method of the invention may be capable of expressing a nucleotide sequence encoding a polypeptide having NADPH-cytochrome p450 reductase activity. That is to say, such a recombinant microorganism may comprise sequence encoding a polypeptide having NADPH-cytochrome p450 reductase activity.

[0090] For the purposes of the invention, a polypeptide having NADPH-Cytochrome P450 reductase activity (EC 1.6.2.4; also known as NADPH:ferrihemoprotein oxidoreductase, NADPH:hemoprotein oxidoreductase, NADPH:P450 oxidoreductase, P450 reductase, POR, CPR, CYPOR) is typically one which is a membrane-bound enzyme allowing electron transfer to cytochrome P450 in the microsome of the eukaryotic cell from a FAD- and FMN-containing enzyme NADPH:cytochrome P450 reductase (POR; EC 1.6.2.4).

[0091] Preferably, a recombinant microorganism suitable for use in a method according to any one of the preceding claims, which is capable of expressing one or more of:
[0092] a. a nucleotide sequence encoding a polypeptide having NADPH-cytochrome p450 reductase activity, wherein said nucleotide sequence comprises:
   [0093] i. a nucleotide sequence encoding a polypeptide having NADPH-cytochrome p450 reductase activity, said polypeptide comprising an amino acid sequence that has at least about 20%, preferably at least 25, 30, 40, 50, 55, 60, 65, 70, 75, 80, 85, 90, 95, 96, 97, 98, or 99%, sequence identity with the amino acid sequence of SEQ ID NOs: 54, 56, 58 or 78;
   [0094] ii. a nucleotide sequence that has at least about 15%, preferably at least 20, 25, 30, 40, 50, 55, 60, 65, 70, 75, 80, 85, 90, 95, 96, 97, 98, or 99%, sequence identity with the nucleotide sequence of SEQ ID NOs: 53, 55, 57 or 77;
   [0095] iii. a nucleotide sequence the complementary strand of which hybridizes to a nucleic acid molecule of sequence of (i) or (ii); or
   [0096] iv. a nucleotide sequence which differs from the sequence of a nucleic acid molecule of (i), (ii) or (iii) due to the degeneracy of the genetic code,

[0097] Preferably, a recombinant microorganism suitable for use in a method of the invention is one which is capable of expressing one or more of:
[0098] a. a nucleotide sequence encoding a polypeptide having ent-copalyl pyrophosphate synthase activity, wherein said nucleotide sequence comprises:
   [0099] i. a nucleotide sequence encoding a polypeptide having ent-copalyl pyrophosphate synthase activity, said polypeptide comprising an amino acid sequence that has at least about 20%, preferably at least 25, 30, 40, 50, 55, 60, 65, 70, 75, 80, 85, 90, 95, 96, 97, 98, or 99%, sequence identity with the amino acid sequence of SEQ ID NOs: 2, 4, 6, 8, 18, 20, 60 or 62;
   [0100] ii. a nucleotide sequence that has at least about 15%, preferably at least 20, 25, 30, 40, 50, 55, 60, 65, 70, 75, 80, 85, 90, 95, 96, 97, 98, or 99%, sequence identity with the nucleotide sequence of SEQ ID NOs: 1, 3, 5, 7, 17, 19, 59 or 61, 141, 142, 151, 152, 153, 154, 159, 160, 182 or 184;
   [0101] iii. a nucleotide sequence the complementary strand of which hybridizes to a nucleic acid molecule of sequence of (i) or (ii); or
   [0102] iv. a nucleotide sequence which differs from the sequence of a nucleic acid molecule of (i), (ii) or (iii) due to the degeneracy of the genetic code,
[0103] b. a nucleotide sequence encoding a polypeptide having ent-Kaurene synthase activity, wherein said nucleotide sequence comprises:
   [0104] i. a nucleotide sequence encoding a polypeptide having ent-Kaurene synthase activity, said polypeptide comprising an amino acid sequence that has at least about 20%, preferably at least 25, 30, 40, 50, 55, 60, 65, 70, 75, 80, 85, 90, 95, 96, 97, 98, or 99%, sequence identity with the amino acid sequence of SEQ ID NOs: 10, 12, 14, 16, 18, 20, 64 or 66;
   [0105] ii. a nucleotide sequence that has at least about 15%, preferably at least 20, 25, 30, 40, 50, 55, 60, 65, 70, 75, 80, 85, 90, 95, 96, 97, 98, or 99%, sequence identity with the nucleotide sequence of SEQ ID NOs: 9, 11, 13, 15, 17, 19, 63, 65, 143, 144, 155, 156, 157, 158, 159, 160, 183 or 184;
   [0106] iii. a nucleotide sequence the complementary strand of which hybridizes to a nucleic acid molecule of sequence of (i) or (ii); or
   [0107] iv. a nucleotide sequence which differs from the sequence of a nucleic acid molecule of (i), (ii) or (iii) due to the degeneracy of the genetic code,
[0108] c. a nucleotide sequence encoding a polypeptide having ent-Kaurene oxidase activity, wherein said nucleotide sequence comprises:
   [0109] i. a nucleotide sequence encoding a polypeptide having ent-Kaurene oxidase activity, said polypeptide comprising an amino acid sequence that has at least about 20%, preferably at least 25, 30, 40, 50, 55, 60, 65, 70, 75, 80, 85, 90, 95, 96, 97, 98, or 99%, sequence identity with the amino acid sequence of SEQ ID NOs: 22, 24, 26, 68 or 86;
   [0110] ii. a nucleotide sequence that has at least about 15%, preferably at least 20, 25, 30, 40, 50, 55, 60, 65, 70, 75, 80, 85, 90, 95, 96, 97, 98, or 99%, sequence identity with the nucleotide sequence of SEQ ID NOs: 21, 23, 25, 67, 85, 145, 161, 162, 163, 180 or 186;
   [0111] iii. a nucleotide sequence the complementary strand of which hybridizes to a nucleic acid molecule of sequence of (i) or (ii); or
   [0112] iv. a nucleotide sequence which differs from the sequence of a nucleic acid molecule of (i), (ii) or (iii) due to the degeneracy of the genetic code; or
[0113] d. a nucleotide sequence encoding a polypeptide having kaurenoic acid 13-hydroxylase activity, wherein said nucleotide sequence comprises:
   [0114] i. a nucleotide sequence encoding a polypeptide having kaurenoic acid 13-hydroxylase activity, said polypeptide comprising an amino acid sequence that has at least about 20%, preferably at least 25, 30, 40, 50, 55, 60, 65, 70, 75, 80, 85, 90, 95, 96, 97, 98, or 99%, sequence identity with the amino acid sequence of SEQ ID NOs: 28, 30, 32, 34, 70, 90, 92, 94, 96 or 98;
   [0115] ii. a nucleotide sequence that has at least about 15%, preferably at least 20, 25, 30, 40, 50, 55, 60, 65, 70, 75, 80, 85, 90, 95, 96, 97, 98, or 99%, sequence identity with the nucleotide sequence of SEQ ID NOs: 27, 29, 31, 33, 69, 89, 91, 93, 95, 97, 146, 164, 165, 166, 167 or 185;
   [0116] iii. a nucleotide sequence the complementary strand of which hybridizes to a nucleic acid molecule of sequence of (i) or (ii); or
   [0117] iv. a nucleotide sequence which differs from the sequence of a nucleic acid molecule of (i), (ii) or (iii) due to the degeneracy of the genetic code.

[0118] In a recombinant microorganism suitable for use in a method of the invention, which is capable of expressing a nucleotide sequence encoding a polypeptide capable of catalyzing the addition of a C-13-glucose to steviol, said nucleotide may comprise:
[0119] i. a nucleotide sequence encoding a polypeptide capable of catalyzing the addition of a C-13-glucose to steviol, said polypeptide comprising an amino acid sequence that has at least about 20%, preferably at least 25, 30, 40, 50, 55, 60, 65, 70, 75, 80, 85, 90, 95, 96, 97, 98, or 99%, sequence identity with the amino acid sequence of SEQ ID NOs: 36, 38 or 72;
[0120] ii. a nucleotide sequence that has at least about 15%, preferably at least 20, 25, 30, 40, 50, 55, 60, 65, 70, 75, 80, 85, 90, 95, 96, 97, 98, or 99%, sequence identity with the nucleotide sequence of SEQ ID NOs: 35, 37, 71, 147, 168, 169 or 189;
[0121] iii. a nucleotide sequence the complementary strand of which hybridizes to a nucleic acid molecule of sequence of (i) or (ii); or
[0122] iv. a nucleotide sequence which differs from the sequence of a nucleic acid molecule of (i), (ii) or (iii) due to the degeneracy of the genetic code.

[0123] In a recombinant microorganism suitable for use in a method of the invention, which is capable of expressing a nucleotide sequence encoding a polypeptide capable of catalyzing the addition of a glucose at the C-13 position of steviolmonoside (this typically indicates glucosylation of the C-2′ of the C-13-glucose/13-O-glucose of steviolmonoside), said nucleotide sequence may comprise:
[0124] i. a nucleotide sequence encoding a polypeptide capable of catalyzing the addition of a C-13-glucose to steviol or steviolmonoside, said polypeptide comprising an amino acid sequence that has at least about 20%, preferably at least 25, 30, 40, 50, 55, 60, 65, 70, 75, 80, 85, 90, 95, 96, 97, 98, or 99%, sequence identity with the amino acid sequence of SEQ ID NOs: 88, 100, 102, 104, 106, 108, 110 or 112;
[0125] ii. a nucleotide sequence that has at least about 15%, preferably at least 20, 25, 30, 40, 50, 55, 60, 65, 70, 75, 80, 85, 90, 95, 96, 97, 98, or 99%, sequence identity with the nucleotide sequence of SEQ ID NOs: 87, 99, 101, 103, 105, 107, 109, 111, 181 or 192;
[0126] iii. a nucleotide sequence the complementary strand of which hybridizes to a nucleic acid molecule of sequence of (i) or (ii); or
[0127] iv. a nucleotide sequence which differs from the sequence of a nucleic acid molecule of (i), (ii) or (iii) due to the degeneracy of the genetic code.

[0128] In a recombinant microorganism suitable for use in a method of the invention, which is capable of expressing a nucleotide sequence encoding a polypeptide capable of catalyzing the addition of a glucose at the C-19 position of steviolbioside, said nucleotide sequence may comprise:
[0129] i. a nucleotide sequence encoding a polypeptide capable of catalyzing the addition of a glucose at the C-19 position of steviolbioside, said polypeptide comprising an amino acid sequence that has at least about 20% sequence identity with the amino acid sequence of SEQ ID NOs: 40, 42, 44, 46, 48 or 74;
[0130] ii. a nucleotide sequence that has at least about 15% sequence identity with the nucleotide sequence of SEQ ID NOs: 39, 41, 43, 45, 47, 73, 148, 170, 171, 172, 173, 174 or 190;
[0131] iii. a nucleotide sequence the complementary strand of which hybridizes to a nucleic acid molecule of sequence of (i) or (ii); or
[0132] iv. a nucleotide sequence which differs from the sequence of a nucleic acid molecule of (i), (ii) or (iii) due to the degeneracy of the genetic code.

[0133] In a recombinant microorganism suitable for use in a method of the invention, which expresses a nucleotide sequence encoding a polypeptide capable of catalyzing glucosylation of the C-3′ of the glucose at the C-13 position of stevioside, said nucleotide sequence may comprise:
[0134] i. a nucleotide sequence encoding a polypeptide capable of catalyzing glucosylation of the C-3′ of the glucose at the C-13 position of stevioside, said polypeptide comprising an amino acid sequence that has at least about 20%, preferably at least 25, 30, 40, 50, 55, 60, 65, 70, 75, 80, 85, 90, 95, 96, 97, 98, or 99%, sequence identity with the amino acid sequence of SEQ ID NOs: 50, 52 or 76;
[0135] ii. a nucleotide sequence that has at least about 15%, preferably at least 20, 25, 30, 40, 50, 55, 60, 65, 70, 75, 80, 85, 90, 95, 96, 97, 98, or 99%, sequence identity with the nucleotide sequence of SEQ ID NOs: 49, 51, 75, 149, 175, 176 or 191;
[0136] iii. a nucleotide sequence the complementary strand of which hybridizes to a nucleic acid molecule of sequence of (i) or (ii); or
[0137] iv. a nucleotide sequence which differs from the sequence of a nucleic acid molecule of (i), (ii) or (iii) due to the degeneracy of the genetic code.

[0138] In a recombinant microorganism suitable for use in a method of the invention, which expresses a nucleotide sequence encoding a polypeptide capable of catalysing one or more of: the glucosylation of stevioside or rebaudioside A to rebaudioside D; the glucosylation of stevioside to rebaudioside E; or the glucosylation of rebaudioside E to rebaudioside D, said nucleotide sequence may comprise:
[0139] i. a nucleotide sequence encoding a polypeptide capable of catalysing one or more of: the glucosylation of stevioside or rebaudioside A to rebaudioside D; the glucosylation of stevioside to rebaudioside E; or the glucosylation of rebaudioside E to rebaudioside D, said polypeptide comprising an amino acid sequence that has at least about 20% sequence identity with the amino acid sequence of SEQ ID NOs: 88, 100, 102, 104, 106, 108, 110, 112;
[0140] ii. a nucleotide sequence that has at least about 15% sequence identity with the nucleotide sequence of SEQ ID NOs: 87, 99, 101, 103, 105, 107, 109, 111, 181 or 192;
[0141] iii. a nucleotide sequence the complementary strand of which hybridizes to a nucleic acid molecule of sequence of (i) or (ii); or
[0142] iv. a nucleotide sequence which differs from the sequence of a nucleic acid molecule of (i), (ii) or (iii) due to the degeneracy of the genetic code.

[0143] A microorganism suitable for use in a method according to the invention, may be one in which the ability of the microorganism to produce geranylgeranyl pyrophosphate (GGPP) is upregulated. Upregulated in the context of this invention implies that the microorganism produces more GGPP than an equivalent non-transformed strain.

[0144] Accordingly, a microorganism suitable for use in a method of the invention may comprise one or more nucleotide sequence(s) encoding hydroxymethylglutaryl-CoA reductase. farnesyl-pyrophosphate synthetase and geranylgeranyl diphosphate synthase, whereby the nucleotide sequence(s) upon transformation of the microorganism confer(s) on the microorganism the ability to produce elevated levels of GGPP.

[0145] Preferably, a microorganism suitable for use in a method according to the invention is one which is capable of expressing one or more of:
[0146] a. a nucleotide sequence encoding a polypeptide having hydroxymethylglutaryl-CoA reductase activity, wherein said nucleotide sequence comprises:
   [0147] i. a nucleotide sequence encoding a polypeptide having hydroxymethylglutaryl-CoA reductase activity, said polypeptide comprising an amino acid sequence that has at least about 20% sequence identity with the amino acid sequence of SEQ ID NO: 80;
   [0148] ii. a nucleotide sequence that has at least about 15% sequence identity with the nucleotide sequence of SEQ ID NO: 79;
   [0149] iii. a nucleotide sequence the complementary strand of which hybridizes to a nucleic acid molecule of sequence of (i) or (ii); or
   [0150] iv. a nucleotide sequence which differs from the sequence of a nucleic acid molecule of (i), (ii) or (iii) due to the degeneracy of the genetic code,
[0151] b. a nucleotide sequence encoding a polypeptide having farnesyl-pyrophosphate synthetase activity, wherein said nucleotide sequence comprises:
   [0152] i. a nucleotide sequence encoding a polypeptide having farnesyl-pyrophosphate synthetase activity, said polypeptide comprising an amino acid sequence that has at least about 20% sequence identity with the amino acid sequence of SEQ ID NO: 82;
   [0153] ii. a nucleotide sequence that has at least about 15% sequence identity with the nucleotide sequence of SEQ ID NOs: 81;
   [0154] iii. a nucleotide sequence the complementary strand of which hybridizes to a nucleic acid molecule of sequence of (i) or (ii); or
   [0155] iv. a nucleotide sequence which differs from the sequence of a nucleic acid molecule of (iii) due to the degeneracy of the genetic code; or
[0156] c. a nucleotide sequence encoding a polypeptide having geranylgeranyl diphosphate synthase activity, wherein said nucleotide sequence comprises:
   [0157] i. a nucleotide sequence encoding a polypeptide having geranylgeranyl diphosphate synthase activity, said polypeptide comprising an amino acid sequence that has at least about 20% sequence identity with the amino acid sequence of SEQ ID NO: 84;
   [0158] ii. a nucleotide sequence that has at least about 15% sequence identity with the nucleotide sequence of SEQ ID NOs: 83;
   [0159] iii. a nucleotide sequence the complementary strand of which hybridizes to a nucleic acid molecule of sequence of (i) or (ii); or
   [0160] iv. a nucleotide sequence which differs from the sequence of a nucleic acid molecule of (i), (ii) or (iii) due to the degeneracy of the genetic code.

[0161] The process of the invention comprises the use of a recombinant microorganism. A microorganism or microbe, for the purposes of this invention, is typically an organism that is not visible to the human eye (i.e. microscopic). A microorganism may be from bacteria, fungi, archaea or protists. Typically a microorganism will be a single-celled or unicellular organism.

[0162] As used herein a recombinant microorganism is defined as a microorganism which is genetically modified or transformed/transfected with one or more of the nucleotide sequences as defined herein. The presence of the one or more such nucleotide sequences alters the ability of the microorganism to produce a diterpene or diterpene glycoside, in particular steviol or steviol glycoside. A microorganism that is not transformed/transfected or genetically modified, is not a recombinant microorganism and does typically not comprise one or more of the nucleotide sequences enabling the cell to produce a diterpene or diterpene glycoside. Hence, a non-transformed/non-transfected microorganism is typically a microorganism that does not naturally produce a diterpene, although a microorganism which naturally produces a diterpene or diterpene glycoside and which has been modified according to the invention (and which thus has an altered ability to produce a diterpene/diterpene gylcoside) is considered a recombinant microorganism according to the invention.

[0163] Sequence identity is herein defined as a relationship between two or more amino acid (polypeptide or protein) sequences or two or more nucleic acid (polynucleotide) sequences, as determined by comparing the sequences. Usually, sequence identities or similarities are compared over the whole length of the sequences compared. In the art, “identity” also means the degree of sequence relatedness between amino acid or nucleic acid sequences, as the case may be, as determined by the match between strings of such sequences. “Identity” and “similarity” can be readily calculated by various methods, known to those skilled in the art. Preferred methods to determine identity are designed to give the largest match between the sequences tested. Typically then, identities and similarities are calculated over the entire length of the sequences being compared. Methods to determine identity and similarity are codified in publicly available computer programs. Preferred computer program methods to determine identity and similarity between two sequences include e.g. the BestFit, BLASTP, BLASTN, and FASTA (Altschul, S. F. et al., J. Mol. Biol. 215:403-410 (1990), publicly available from NCBI and other sources (BLAST Manual, Altschul, S., et al., NCBI NLM NIH Bethesda, Md. 20894). Preferred parameters for amino acid sequences comparison using BLASTP are gap open 10.0, gap extend 0.5, Blosum 62 matrix. Preferred parameters for nucleic acid sequences comparison using BLASTP are gap open 10.0, gap extend 0.5, DNA full matrix (DNA identity matrix).

[0164] Nucleotide sequences encoding the enzymes expressed in the cell of the invention may also be defined by their capability to hybridize with the nucleotide sequences of SEQ ID NO.'s 1, 3, 5, 7, 9, 11, 13, 15, 17, 19, 21, 23, 25, 27, 29, 31, 33, 35, 37, 39, 41, 43, 45, 47, 49, 51, 53, 55, 57, 59, 61, 63, 65, 67, 69, 71, 73, 75, 77, 79, 81 or 84 it any other sequence mentioned herein respectively, under moderate, or preferably under stringent hybridisation conditions. Stringent hybridisation conditions are herein defined as conditions that allow a nucleic acid sequence of at least about 25, preferably about 50 nucleotides, 75 or 100 and most preferably of about 200 or more nucleotides, to hybridise at a temperature of about 65° C. in a solution comprising about 1 M salt, preferably 6×SSC or any other solution having a comparable ionic strength, and washing at 65° C. in a solution comprising about 0.1 M salt, or less, preferably 0.2×SSC or any other solution having a comparable ionic strength. Preferably, the hybridisation is performed overnight, i.e. at least for 10 hours and preferably washing is performed for at least one hour with at least two changes of the washing solution. These conditions will usually allow the specific hybridisation of sequences having about 90% or more sequence identity.

[0165] Moderate conditions are herein defined as conditions that allow a nucleic acid sequences of at least 50 nucleotides, preferably of about 200 or more nucleotides, to hybridise at a temperature of about 45° C. in a solution comprising about 1 M salt, preferably 6×SSC or any other solution having a comparable ionic strength, and washing at room temperature in a solution comprising about 1 M salt, preferably 6×SSC or any other solution having a comparable ionic strength. Preferably, the hybridisation is performed overnight, i.e. at least for 10 hours, and preferably washing is performed for at least one hour with at least two changes of the washing solution. These conditions will usually allow the specific hybridisation of sequences having up to 50% sequence identity. The person skilled in the art will be able to modify these hybridisation conditions in order to specifically identify sequences varying in identity between 50% and 90%.

[0166] The nucleotide sequences encoding an ent-copalyl pyrophosphate synthase; ent-Kaurene synthase; ent-Kaurene oxidase; kaurenoic acid 13-hydroxylase; UGT; hydroxymethylglutaryl-CoA reductase, farnesyl-pyrophosphate synthetase; geranylgeranyl diphosphate synthase; NADPH-cytochrome p450 reductase, may be from prokaryotic or eukaryotic origin.

[0167] A nucleotide sequence encoding an ent-copalyl pyrophosphate synthase may for instance comprise a sequence as set out in SEQ ID. NO: 1, 3, 5, 7, 17, 19, 59, 61, 141, 142, 151, 152, 153, 154, 159, 160, 182 or 184.

[0168] A nucleotide sequence encoding an ent-Kaurene synthase may for instance comprise a sequence as set out in SEQ ID. NO: 9, 11, 13, 15, 17, 19, 63, 65, 143, 144, 155, 156, 157, 158, 159, 160, 183 or 184.

[0169] A nucleotide sequence encoding an ent-Kaurene oxidase may for instance comprise a sequence as set out in SEQ ID. NO: 21, 23, 25, 67, 85, 145, 161, 162, 163, 180 or 186. A preferred KO is the polypeptide encoded by the nucleic acid set out in SEQ ID NO: 85.

[0170] A nucleotide sequence encoding a kaurenoic acid 13-hydroxylase may for instance comprise a sequence as set out in SEQ ID. NO: 27, 29, 31, 33, 69, 89, 91, 93, 95, 97, 146, 164, 165, 166, 167 or 185. A preferred KAH sequence is the polypeptide encoded by the nucleic acid set out in SEQ ID NO: 33.

[0171] A further preferred recombinant microorganism of the invention may express a combination of the polypeptides encoded by SEQ ID NO: 85 and SEQ ID NO: 33 or a variant of either thereof as herein described. A preferred recombinant microorganism of the invention may expression the combination of sequences set out in Table 8 (in combination with any UGT2, but in particular that encoded by SEQ ID NO: 87).

[0172] A nucleotide sequence encoding a UGT may for instance comprise a sequence as set out in SEQ ID. NO: 35, 37, 39, 41, 43, 45, 47, 49, 51, 71, 73, 75, 168, 169, 170, 171, 172, 173, 174, 175, 176, 147, 148, 149, 87, 181, 99, 100, 101, 102, 103, 104, 105, 106, 107, 108, 109, 110, 111, 112, 113, 114, 115, 116, 117, 118, 119, 120, 121, 122, 123, 124, 125, 126, 127, 128, 129, 130, 131, 132, 133, 134, 135, 136, 137, 138, 139, 140, 189, 190, 191 or 192.

[0173] A nucleotide sequence encoding a hydroxymethylglutaryl-CoA reductase may for instance comprise a sequence as set out in SEQ ID. NO: 79.

[0174] A nucleotide sequence encoding a farnesyl-pyrophosphate synthetase may for instance comprise a sequence as set out in SEQ ID. NO: 81.

[0175] A nucleotide sequence encoding a geranylgeranyl diphosphate synthase may for instance comprise a sequence as set out in SEQ ID. NO:83.

[0176] A nucleotide sequence encoding a NADPH-cytochrome p450 reductase may for instance comprise a sequence as set out in SEQ ID. NO: 53, 55, 57 or 77.

[0177] In the case of the UGT sequences, combinations of at least one from each of: (i) SEQ ID NOs: 35, 37, 168, 169, 71, 147 or 189; (ii) SEQ ID NOs: 87, 99, 101, 103, 105, 107, 109, 111, 181 or 192; (iii) SEQ ID NOs: 39, 41, 43, 45, 47, 170, 171, 172, 173, 174, 73, 148 or 190; and (iv) SEQ ID NOs: 49, 51, 175, 176, 75, 149 or 191 may be preferred. Typically, at least one UGT from group (i) may be used. If at least one UGT from group (iii) is used, generally at least one UGT from group (i) is also used. If at least one UGT from group (iv) is used, generally at least one UGT from group (i) and at least one UGT from group (iii) is used. Typically, at least one UGT form group (ii) is used.

[0178] A sequence which has at least about 10%, about 15%, about 20%, preferably at least about 25%, about 30%, about 40%, about 50%, about 55%, about 60%, about 65%, about 70%, about 75%, about 80%, about 85%, about 90%, about 95%, about 96%, about 97%, about 98%, or about 99% sequence identity with a sequence as mentioned may be used in the invention.

[0179] To increase the likelihood that the introduced enzymes are expressed in active form in a cell, the corresponding encoding nucleotide sequence may be adapted to optimise its codon usage to that of the chosen eukaryote host cell. The adaptiveness of the nucleotide sequences encoding the enzymes to the codon usage of the chosen host cell may be expressed as codon adaptation index (CAI). The codon adaptation index is herein defined as a measurement of the relative adaptiveness of the codon usage of a gene towards the codon usage of highly expressed genes. The relative adaptiveness (w) of each codon is the ratio of the usage of each codon, to that of the most abundant codon for the same amino acid. The CAI index is defined as the geometric mean of these relative adaptiveness values. Non-synonymous codons and termination codons (dependent on genetic code) are excluded. CAI values range from 0 to 1, with higher values indicating a higher proportion of the most abundant codons (see Sharp and Li, 1987, Nucleic Acids Research 15: 1281-1295; also see: Jansen et al., 2003, Nucleic Acids Res. 31(8):2242-51). An adapted nucleotide sequence preferably has a CAI of at least 0.2, 0.3, 0.4, 0.5, 0.6 or 0.7.

[0180] In a preferred embodiment the eukaryotic cell according to the present invention is genetically modified with (a) nucleotide sequence(s) which is (are) adapted to the codon usage of the eukaryotic cell using codon pair optimisation technology as disclosed in PCT/EP2007/05594. Codon-pair optimisation is a method for producing a polypeptide in a host cell, wherein the nucleotide sequences encoding the polypeptide have been modified with respect to their codon-usage, in particular the codon-pairs that are used, to obtain improved expression of the nucleotide sequence encoding the polypeptide and/or improved production of the polypeptide. Codon pairs are defined as a set of two subsequent triplets (codons) in a coding sequence.

[0181] Further improvement of the activity of the enzymes in vivo in a eukaryotic host cell of the invention, can be obtained by well-known methods like error prone PCR or directed evolution. A preferred method of directed evolution is described in WO03010183 and WO03010311.

[0182] The microorganism according to the present invention may be any suitable host cell from microbial origin. Preferably, the host cell is a yeast or a filamentous fungus. More preferably, the host cell belongs to one of the genera Saccharomyces, Aspergillus, Penicillium, Pichia, Kluyveromyces, Yarrowia, Candida, Hansenula, Humicola, Torulaspora, Trichosporon, Brettanomyces, Pachysolen or Yamadazyma or Zygosaccharomyces.

[0183] A more preferred microorganism belongs to the species Aspergillus niger, Penicillium chrysogenum, Pichia stipidis, Kluyveromyces marxianus, K. lactis, K. thermotolerans, Yarrowia lipolytica, Candida sonorensis, C. glabrata, Hansenula polymorpha, Torulaspora delbrueckii, Brettanomyces bruxellensis, Zygosaccharomyces bailii, Saccharomyces uvarum, Saccharomyces bayanus or Saccharomyces cerevisiae species. Preferably, the microorganism is Yarrowia, in particular, Yarrowia lipolyptica.

[0184] A recombinant microorganism suitable for use in a method according to the invention may be modified so that the ERG9 gene is down-regulated and or the ERG5/ERG6 genes are deleted. Corresponding genes may be modified in this way in other microorganisms.

[0185] Such a microorganism may be transformed as set out herein, whereby the nucleotide sequence(s) with which the microorganism is transformed confer(s) on the cell the ability to produce a diterpene or glycoside thereof.

[0186] A preferred microorganism for use in the invention is a Yarrowia lipolytica cell. A recombinant Yarrowia lipolytica cell may comprise one or more nucleotide sequence(s) from each of the following groups;

[0187] (i) SEQ ID. NO: 1, 3, 5, 7, 17, 19, 59, 61, 141, 142, 152, 153, 154, 159, 160, 182 or 184.

[0188] (ii) SEQ ID. NO: 9, 11, 13, 15, 17, 19, 63, 65, 143, 144, 155, 156, 157, 158, 159, 160, 183 or 184.

[0189] (iii) SEQ ID. NO: 21, 23, 25, 67 85, 145, 161, 162, 163, 180 or 186.

[0190] (iv) SEQ ID. NO: 27, 29, 31, 33, 69, 89, 91, 93, 95, 97, 146, 164, 165, 166, 167 or 185.

[0191] Such a microorganism will typically also comprise one or more nucleotide sequence(s) as set out in SEQ ID. NO: 53, 55, 57 or 77.

[0192] Such a microorganism may also comprise one or more nucleotide sequences as set out in 35, 37, 39, 41, 43, 45, 47, 49, 51, 71, 73, 75, 168, 169, 170, 171, 172, 173, 174, 175, 176, 147, 148, 149, 87, 181, 99, 100, 101, 102, 103, 104, 105, 106, 107, 108, 109, 110, 111, 112, 113, 114, 115, 116, 117, 118, 119, 120, 121, 122, 123, 124, 125, 126, 127, 128, 129, 130, 131, 132, 133, 134, 135, 136, 137, 138, 139, 140, 189, 190, 191 or 192. In the case of these sequences, combinations of at least one from each of (i) SEQ ID NOs: 35, 37, 168, 169, 71, 147 or 189; (ii) SEQ ID NOs: 87, 99, 101, 103, 105, 107, 109, 111, 181 or 192; (iii) SEQ ID NOs: 39, 41, 43, 45, 47, 170, 171, 172, 173, 174, 73, 148 or 190; and (iv) SEQ ID NOs: 49, 51, 175, 176, 75, 149 or 191 may be preferred. Typically, at least one UGT from group (i) may be used. If at least one UGT from group (iii) is used, generally at least one UGT from group (i) is also used. If at least one UGT from group (iv) is used, generally at least one UGT from group (i) and at least one UGT from group (iii) is used. Typically, at least one UGT form group (ii) is used.

[0193] Such a microorganism may also comprise the following nucleotide sequences: SEQ ID. NO: 79; SEQ ID. NO: 81; and SEQ ID. NO: 83.

[0194] For each sequence set out above (or any sequence mentioned herein), a variant having at least about 15%, preferably at least about 20, about 25, about 30, about 40, about 50, about 55, about 60, about 65, about 70, about 75, about 80, about 85, about 90, about 95, about 96, about 97, about 98, or about 99%, sequence identity with the stated sequence may be used.

[0195] The nucleotide sequences encoding the ent-copalyl pyrophosphate synthase, ent-Kaurene synthase, ent-Kaurene oxidase, kaurenoic acid 13-hydroxylase, UGTs, hydroxymethylglutaryl-CoA reductase, farnesyl-pyrophosphate synthetase, geranylgeranyl diphosphate synthase and NADPH-cytochrome p450 reductase may be ligated into one or more nucleic acid constructs to facilitate the transformation of the microorganism according to the present invention.

[0196] A nucleic acid construct may be a plasmid carrying the genes encoding enzymes of the diterpene, eg. steviol/steviol glycoside, pathway as described above, or a nucleic acid construct may comprise two or three plasmids carrying each three or two genes, respectively, encoding the enzymes of the diterpene pathway distributed in any appropriate way.

[0197] Any suitable plasmid may be used, for instance a low copy plasmid or a high copy plasmid.

[0198] It may be possible that the enzymes selected from the group consisting of ent-copalyl pyrophosphate synthase, ent-Kaurene synthase, ent-Kaurene oxidase, and kaurenoic acid 13-hydroxylase, UGTs, hydroxymethylglutaryl-CoA reductase, farnesyl-pyrophosphate synthetase, geranylgeranyl diphosphate synthase and NADPH-cytochrome p450 reductase are native to the host microorganism and that transformation with one or more of the nucleotide sequences encoding these enzymes may not be required to confer the host cell the ability to produce a diterpene or diterpene glycosidase. Further improvement of diterpene/diterpene glycosidase production by the host microorganism may be obtained by classical strain improvement.

[0199] The nucleic acid construct may be maintained episomally and thus comprise a sequence for autonomous replication, such as an autosomal replication sequence sequence. If the host cell is of fungal origin, a suitable episomal nucleic acid construct may e.g. be based on the yeast 2μ or pKD1 plasmids (Gleer et al., 1991, Biotechnology 9: 968-975), or the AMA plasmids (Fierro et al., 1995, Curr Genet. 29:482-489).

[0200] Alternatively, each nucleic acid construct may be integrated in one or more copies into the genome of the host cell. Integration into the host cell's genome may occur at random by non-homologous recombination but preferably the nucleic acid construct may be integrated into the host cell's genome by homologous recombination as is well known in the art (see e.g. WO90/14423, EP-A-0481008, EP-A-0635 574 and U.S. Pat. No. 6,265,186).

[0201] Optionally, a selectable marker may be present in the nucleic acid construct. As used herein, the term “marker” refers to a gene encoding a trait or a phenotype which permits the selection of, or the screening for, a microorganism containing the marker. The marker gene may be an antibiotic resistance gene whereby the appropriate antibiotic can be used to select for transformed cells from among cells that are not transformed. Alternatively or also, non-antibiotic resistance markers are used, such as auxotrophic markers (URA3, TRP1, LEU2). The host cells transformed with the nucleic acid constructs may be marker gene free. Methods for constructing recombinant marker gene free microbial host cells are disclosed in EP-A-0 635 574 and are based on the use of bidirectional markers. Alternatively, a screenable marker such as Green Fluorescent Protein, lacZ, luciferase, chloramphenicol acetyltransferase, beta-glucuronidase may be incorporated into the nucleic acid constructs of the invention allowing to screen for transformed cells. A preferred marker-free method for the introduction of heterologous polynucleotides is described in WO0540186.

[0202] In a preferred embodiment, the nucleotide sequences encoding ent-copalyl pyrophosphate synthase, ent-Kaurene synthase, ent-Kaurene oxidase, and kaurenoic acid 13-hydroxylase, UGTs, hydroxymethylglutaryl-CoA reductase, farnesyl-pyrophosphate synthetase, geranylgeranyl diphosphate synthase and NADPH-cytochrome p450 reductase, are each operably linked to a promoter that causes sufficient expression of the corresponding nucleotide sequences in the eukaryotic cell according to the present invention to confer to the cell the ability to produce a diterpene or diterpene glycoside.

[0203] As used herein, the term “operably linked” refers to a linkage of polynucleotide elements (or coding sequences or nucleic acid sequence) in a functional relationship. A nucleic acid sequence is “operably linked” when it is placed into a functional relationship with another nucleic acid sequence. For instance, a promoter or enhancer is operably linked to a coding sequence if it affects the transcription of the coding sequence.

[0204] As used herein, the term “promoter” refers to a nucleic acid fragment that functions to control the transcription of one or more genes, located upstream with respect to the direction of transcription of the transcription initiation site of the gene, and is structurally identified by the presence of a binding site for DNA-dependent RNA polymerase, transcription initiation sites and any other DNA sequences, including, but not limited to transcription factor binding sites, repressor and activator protein binding sites, and any other sequences of nucleotides known to one of skilled in the art to act directly or indirectly to regulate the amount of transcription from the promoter. A “constitutive” promoter is a promoter that is active under most environmental and developmental conditions. An “inducible” promoter is a promoter that is active under environmental or developmental regulation.

[0205] The promoter that could be used to achieve the expression of the nucleotide sequences coding for an enzyme as defined herein above, may be not native to the nucleotide sequence coding for the enzyme to be expressed, i.e. a promoter that is heterologous to the nucleotide sequence (coding sequence) to which it is operably linked. Preferably, the promoter is homologous, i.e. endogenous to the host cell

[0206] Suitable promoters in microorganisms of the invention may be GAL7, GAL10, or GAL 1, CYC1, HIS3, ADH1, PGL, PH05, GAPDH, ADC1, TRP1, URA3, LEU2, ENO, TPI, and AOX1. Other suitable promoters include PDC, GPD1, PGK1, TEF1, and TDH. Further suitable promoters are set out in the Examples.

[0207] Any terminator, which is functional in the cell, may be used in the present invention. Preferred terminators are obtained from natural genes of the host cell. Suitable terminator sequences are well known in the art. Preferably, such terminators are combined with mutations that prevent nonsense mediated mRNA decay in the host cell of the invention (see for example: Shirley et al., 2002, Genetics 161:1465-1482).

[0208] Nucleotide sequences used in the invention may include sequences which target them to desired compartments of the microorganism. For example, in a preferred microorganism of the invention, all nucleotide sequences, except for ent-Kaurene oxidase, kaurenoic acid 13-hydroxylase and NADPH-cytochrome p450 reductase encoding sequences may be targeted to the cytosol. This approach may be used in a yeast cell.

[0209] The term “homologous” when used to indicate the relation between a given (recombinant) nucleic acid or polypeptide molecule and a given host organism or host cell, is understood to mean that in nature the nucleic acid or polypeptide molecule is produced by a host cell or organisms of the same species, preferably of the same variety or strain.

[0210] The term “heterologous” when used with respect to a nucleic acid (DNA or RNA) or protein refers to a nucleic acid or protein that does not occur naturally as part of the organism, cell, genome or DNA or RNA sequence in which it is present, or that is found in a cell or location or locations in the genome or DNA or RNA sequence that differ from that in which it is found in nature. Heterologous nucleic acids or proteins are not endogenous to the cell into which it is introduced, but have been obtained from another cell or synthetically or recombinantly produced.

[0211] Typically, a recombinant microorganism suitable for use in a method of the invention will comprise heterologous nucleotide sequences. Alternatively, a recombinant microorganism suitable for use in a method of the invention may comprise entirely homologous sequence which has been modified as set out herein so that the microorganism produces increased amounts of a diterpene and/or diterpene glycoside in comparison to a non-modified version of the same microorganism.

[0212] One or more enzymes of the diterpene pathway as described herein may be overexpressed to achieve a sufficient diterpene production by the cell.

[0213] There are various means available in the art for overexpression of enzymes in the host cells of the invention. In particular, an enzyme may be overexpressed by increasing the copy number of the gene coding for the enzyme in the host cell, e.g. by integrating additional copies of the gene in the host cell's genome.

[0214] A preferred host cell according to the present invention may be a recombinant cell which is naturally capable of producing GGPP.

[0215] A recombinant microorganism suitable for use in a method according to the present invention may be able to grow on any suitable carbon source known in the art and convert it to a diterpene or a diterpene glycoside. The recombinant microorganism may be able to convert directly plant biomass, celluloses, hemicelluloses, pectines, rhamnose, galactose, fucose, maltose, maltodextrines, ribose, ribulose, or starch, starch derivatives, sucrose, lactose and glycerol. Hence, a preferred host organism expresses enzymes such as cellulases (endocellulases and exocellulases) and hemicellulases (e.g.

[0216] endo- and exo-xylanases, arabinases) necessary for the conversion of cellulose into glucose monomers and hemicellulose into xylose and arabinose monomers, pectinases able to convert pectines into glucuronic acid and galacturonic acid or amylases to convert starch into glucose monomers. Preferably, the host cell is able to convert a carbon source selected from the group consisting of glucose, xylose, arabinose, sucrose, lactose and glycerol. The host cell may for instance be a eukaryotic host cell as described in WO03/062430, WO06/009434, EP1499708B1, WO2006096130 or WO04/099381.

[0217] The present invention relates to a process for the production of a diterpene or diterpene glycoside comprising fermenting a recombinant microorganism as described herein in a suitable fermentation medium, and recovering the diterpene and/or diterpene glycoside from the fermentation medium.

[0218] The fermentation medium used in the process for the production of a diterpene or diterpene glycoside may be any suitable fermentation medium which allows growth of the recombinant cell. The essential elements of suitable fermentation media are known to the person skilled in the art and may be adapted to the specific cell which is used.

[0219] Preferably, the fermentation medium comprises a carbon source selected from the group consisting of plant biomass, celluloses, hemicelluloses, pectines, rhamnose, galactose, fucose, fructose, maltose, maltodextrines, ribose, ribulose, or starch, starch derivatives, sucrose, lactose, fatty acids, triglycerides and glycerol. Preferably, the fermentation medium also comprises a nitrogen source such as ureum, or an ammonium salt such as ammonium sulphate, ammonium chloride, ammoniumnitrate or ammonium phosphate.

[0220] The fermentation process according to the present invention may be carried out in batch, fed-batch or continuous mode. A separate hydrolysis and fermentation (SHF) process or a simultaneous saccharification and fermentation (SSF) process may also be applied. A combination of these fermentation process modes may also be possible for optimal productivity. A SSF process may be particularly attractive if starch, cellulose, hemicelluose or pectin is used as a carbon source in the fermentation process, where it may be necessary to add hydrolytic enzymes, such as cellulases, hemicellulases or pectinases to hydrolyse the substrate.

[0221] The recombinant microorganism used in the process for the preparation of a diterpene or diterpene glycoside may be any suitable microorganism as defined herein above. The cells may be grown at low pH to prevent bacterial contamination.

[0222] The fermentation process for the production of a diterpene according to the present invention may be an aerobic or an anaerobic fermentation process.

[0223] An anaerobic fermentation process may be herein defined as a fermentation process run in the absence of oxygen or in which substantially no oxygen is consumed, preferably less than 5, 2.5 or 1 mmol/L/h, and wherein organic molecules serve as both electron donor and electron acceptors. The fermentation process according to the present invention may also first be run under aerobic conditions and subsequently under anaerobic conditions.

[0224] The fermentation process may also be run under oxygen-limited, or micro-aerobical, conditions. Alternatively, the fermentation process may first be run under aerobic conditions and subsequently under oxygen-limited conditions. An oxygen-limited fermentation process is a process in which the oxygen consumption is limited by the oxygen transfer from the gas to the liquid. The degree of oxygen limitation is determined by the amount and composition of the ingoing gasflow as well as the actual mixing/mass transfer properties of the fermentation equipment used.

[0225] The production of a diterpene in the process according to the present invention may occur during the growth phase of the host cell, during the stationary (steady state) phase or during both phases. It may be possible to run the fermentation process at different temperatures.

[0226] The process for the production of a diterpene or diterpene glycoside may be run at a temperature which is optimal for the eukaryotic cell. The optimum growth temperature may differ for each transformed eukaryotic cell and is known to the person skilled in the art. The optimum temperature might be higher than optimal for wild type organisms to grow the organism efficiently under non-sterile conditions under minimal infection sensitivity and lowest cooling cost. Alternatively, the process may be carried out at a temperature which is not optimal for growth of the recombinant microorganism. Indeed, we have shown that a process for the preparation of a diterpene or diterpene glycoside may be carried out beneficially at a sub-optimal growth temperature of a recombinant microorganism.

[0227] In the process for the production of a diterpene or diterpene glycoside according to the invention, it may be possible to achieve a concentration of above 5 mg/l fermentation broth, preferably above 10 mg/l, preferably above 20 mg/l, preferably above 30 mg/l fermentation broth, preferably above 40 mg/l, more preferably above 50 mg/l, preferably above 60 mg/l, preferably above 70, preferably above 80 mg/l, preferably above 100 mg/l, preferably above 1 g/l, preferably above 5 g/l, preferably above 10 g/l, but usually below 70 g/l.

[0228] Critically, in the process of the invention, one or more diterpene or glycosylated diterpene is produced extracellularly. That is to say, the process is such that the one or more diterpene or glycosylated diterpene is present in the fermentation medium. For the purposes of the invention, extracellular production is typically indicated where at at least about 30% of one or more diterpene or glycosylated diterpene is produced extracellularly (i.e. present in the fermentation medium). The percentage given indicates how much of the one or more diterpene or glycosylated diterpene is present in the fermentation medium as compared with how much remains within the recombinant microorganism.

[0229] That is to say, at least about 30% of all of the one or more diterpene or glycosylated diterpene produced by the recombinant microorganism is produced extracellularly.

[0230] The amount of one or more diterpene or glycosylated diterpene produced extracellular In the process of the invention, at least about 40%, at least about 50%, at least about 60%, at least about 70%, at least about 80%, at least about 90%, at least about 95% or more of one or more diterpenes or glycosylated diterpenes is produced extracellularly.

[0231] The temperature for growth of the recombinant microorganism in a process for production of a diterpene or diterpene glycoside may be above 20° C., 22° C., 25° C., 28° C., or above 30° C., 35° C., or above 37° C., 40° C., 42° C., and preferably below 45° C. During the production phase of a diterpene or diterpene glycoside however, the optimum temperature might be lower than average in order to optimize biomass stability. The temperature during this phase may be below 45° C., for instance below 42° C., 40° C., 37° C., for instance below 35° C., 30° C., or below 28° C., 25° C., 22° C. or below 20° C. preferably above 15° C.

[0232] The invention thus provides a process for the preparation of a diterpene or glycosylated diterpene which process comprises fermenting a recombinant microorganism capable of producing a diterpene or glycosylate diterpene in a suitable fermentation medium at a temperature of about 29° C. or less, and optionally recovering the diterpene or glycosylated diterpene. The microorganism may be a microorganism according to the invention.

[0233] The temperature of fermentation in such a process may be about 29° C. or less, about 28° C. or less, about 27° C. or less, about 26° C. or less or at a lower temperature.

[0234] The process for the production of a diterpene or diterpene glycoside according to the present invention may be carried out at any suitable pH value. If the recombinant microorganism is yeast, the pH in the fermentation medium preferably has a value of below 6, preferably below 5,5, preferably below 5, preferably below 4,5, preferably below 4, preferably below pH 3,5 or below pH 3,0, or below pH 2,5, preferably above pH 2. An advantage of carrying out the fermentation at these low pH values is that growth of contaminant bacteria in the fermentation medium may be prevented.

[0235] Such a process may be carried out on an industrial scale.

[0236] The product of such a process may be one or more of steviolmonoside, steviolbioside, stevioside or rebaudioside A, rebaudioside B, rebaudioside C, rebaudioside D, rebaudioside E, rebaudioside F, rubusoside, dulcoside A. Preferably, rebaudioside A or rebaudioside D is produced.

[0237] Recovery of the diterpene or diterpene glycoside from the fermentation medium may be performed by known methods in the art, for instance by distillation, vacuum extraction, solvent extraction, or evaporation.

[0238] The present invention also relates to a fermentation broth comprising a diterpene and/or diterpene glycoside obtainable by the process according to the present invention. The diterpene or glycosylated diterpene may be a steviol glycoside, in particular rebaudioside A or rebaudioside D.

[0239] In the event that a diterpene or diterpene glycoside is expressed within the microorganism, such cells may need to be treated so as to release the diterpene/diterpene glycoside.

[0240] The diterpene or diterpene glycoside, for example rebaudioside A or rebuadioside D, produced by the fermentation process according to the present invention may be used in any application known for such compounds. In particular, they may for instance be used as a sweetener, for example in a food or a beverage. For example steviol glycosides may be formulated in soft drinks, juices, as a tabletop sweetener, chewing gum, dairy product such as yoghurt (eg. plain yoghurt), cake, cereal or cereal-based food, nutraceutical, pharmaceutical, edible gel, confectionery product, cosmetic, toothpastes or other oral cavity composition, etc. In addition, a diterpene or diterpene glycoside can be used as a sweetener not only for drinks, foodstuffs, and other products dedicated for human consumption, but also in animal feed and fodder with improved characteristics.

[0241] Accordingly, the invention provides, inter alia, a foodstuff, feed or beverage which comprises a diterpene or glycosylated prepared according to a process of the invention.

[0242] During the manufacturing of foodstuffs, drinks, pharmaceuticals, cosmetics, table top products, chewing gum the conventional methods such as mixing, kneading, dissolution, pickling, permeation, percolation, sprinkling, atomizing, infusing and other methods can be used.

[0243] The diterpene or diterpene glycoside obtained in this invention can be used in dry or liquid forms. It can be added before or after heat treatment of food products. The amount of the sweetener depends on the purpose of usage. It can be added alone or in the combination with other compounds.

[0244] Compounds produced according to the method of the invention may be blended with one or more further non-calorific or calorific sweeteners. Such blending may be used to improve flavour or temporal profile or stability. A wide range of both non-calorific and calorific sweeteners may be suitable for blending with steviol glycosides. For example, non-calorific sweeteners such as mogroside, monatin, aspartame, acesulfame salts, cyclamate, sucralose, saccharin salts or erythritol. Calorific sweeteners suitable for blending with steviol glycosides include sugar alcohols and carbohydrates such as sucrose, glucose, fructose, invert sugar and HFCS. Sweet tasting amino acids such as glycine, alanine or serine may also be used.

[0245] The diterpene or diterpene glycoside can be used in the combination with a sweetener suppressor, such as a natural sweetener suppressor. It may be combined with an umami taste enhancer, such as an amino acid or a salt thereof.

[0246] A diterpene or diterpene glycoside can be combined with a polyol or sugar alcohol, a carbohydrate, a physiologically active substance or functional ingredient (for example a carotenoid, dietary fiber, fatty acid, saponin, antioxidant, nutraceutical, flavonoid, isothiocyanate, phenol, plant sterol or stanol (phytosterols and phytostanols), a polyols, a prebiotic, a probiotic, a phytoestrogen, soy protein, sulfides/thiols, amino acids, a protein, a vitamin, a mineral, and/or a substance classified based on a health benefits, such as cardiovascular, cholesterol-reducing or anti-inflammatory.

[0247] A composition with a diterpene or diterpene glycoside may include a flavoring agent, an aroma component, a nucleotide, an organic acid, an organic acid salt, an inorganic acid, a bitter compound, a protein or protein hydrolyzate, a surfactant, a flavonoid, an astringent compound, a vitamin, a dietary fiber, an antioxidant, a fatty acid and/or a salt.

[0248] A diterpene or diterpene glycoside of the invention may be applied as a high intensity sweetener to produce zero calorie, reduced calorie or diabetic beverages and food products with improved taste characteristics. Also it can be used in drinks, foodstuffs, pharmaceuticals, and other products in which sugar cannot be used.

[0249] In addition, a diterpene or diterpene glycoside of the invention may be used as a sweetener not only for drinks, foodstuffs, and other products dedicated for human consumption, but also in animal feed and fodder with improved characteristics.

[0250] The examples of products where a diterpene or diterpene glycoside of the invention composition can be used as a sweetening compound can be as alcoholic beverages such as vodka, wine, beer, liquor, sake, etc; natural juices, refreshing drinks, carbonated soft drinks, diet drinks, zero calorie drinks, mid and reduced calorie drinks and foods, yogurt drinks, instant juices, instant coffee, powdered types of instant beverages, canned products, syrups, fermented soybean paste, soy sauce, vinegar, dressings, mayonnaise, ketchups, curry, soup, instant bouillon, powdered soy sauce, powdered vinegar, types of biscuits, rice biscuit, crackers, bread, chocolates, caramel, candy, chewing gum, jelly, pudding, preserved fruits and vegetables, fresh cream, jam, marmalade, flower paste, powdered milk, ice cream, sorbet, vegetables and fruits packed in bottles, canned and boiled beans, meat and foods boiled in sweetened sauce, agricultural vegetable food products, seafood, ham, sausage, fish ham, fish sausage, fish paste, deep fried fish products, dried seafood products, frozen food products, preserved seaweed, preserved meat, tobacco, medicinal products, and many others. In principal it can have unlimited applications.

[0251] The sweetened composition comprises a beverage, non-limiting examples of which include non-carbonated and carbonated beverages such as colas, ginger ales, root beers, tonic water, ciders, fruit-flavored soft drinks (e.g., citrus-flavored soft drinks such as lemon-lime or orange), powdered soft drinks, and the like; fruit juices originating in fruits or vegetables, fruit juices including squeezed juices or the like, fruit juices containing fruit particles, fruit beverages, fruit juice beverages, beverages containing fruit juices, beverages with fruit flavorings, vegetable juices, juices containing vegetables, and mixed juices containing fruits and vegetables; sport drinks, energy drinks, near water and the like drinks (e.g., water with natural or synthetic flavorants); tea type or favorite type beverages such as coffee, cocoa, black tea, green tea, oolong tea and the like; beverages containing milk components such as milk beverages, coffee containing milk components, cafe au lait, milk tea, fruit milk beverages, drinkable yogurt, lactic acid bacteria beverages or the like; and dairy products.

[0252] Generally, the amount of sweetener present in a sweetened composition varies widely depending on the particular type of sweetened composition and its desired sweetness. Those of ordinary skill in the art can readily discern the appropriate amount of sweetener to put in the sweetened composition.

[0253] The diterpene or diterpene glycoside of the invention obtained in this invention can be used in dry or liquid forms. It can be added before or after heat treatment of food products. The amount of the sweetener depends on the purpose of usage. It can be added alone or in the combination with other compounds.

[0254] During the manufacturing of foodstuffs, drinks, pharmaceuticals, cosmetics, table top products, chewing gum the conventional methods such as mixing, kneading, dissolution, pickling, permeation, percolation, sprinkling, atomizing, infusing and other methods can be used.

[0255] Thus, compositions of the present invention can be made by any method known to those skilled in the art that provide homogenous even or homogeneous mixtures of the ingredients. These methods include dry blending, spray drying, agglomeration, wet granulation, compaction, co-crystallization and the like.

[0256] In solid form a diterpene or diterpene glycoside of the invention of the present invention can be provided to consumers in any form suitable for delivery into the comestible to be sweetened, including sachets, packets, bulk bags or boxes, cubes, tablets, mists, or dissolvable strips. The composition can be delivered as a unit dose or in bulk form.

[0257] For liquid sweetener systems and compositions convenient ranges of fluid, semi-fluid, paste and cream forms, appropriate packing using appropriate packing material in any shape or form shall be invented which is convenient to carry or dispense or store or transport any combination containing any of the above sweetener products or combination of product produced above.

[0258] The composition may include various bulking agents, functional ingredients, colorants, flavors.

[0259] A reference herein to a patent document or other matter which is given as prior art is not to be taken as an admission that that document or matter was known or that the information it contains was part of the common general knowledge as at the priority date of any of the claims.

[0260] The disclosure of each reference set forth herein is incorporated herein by reference in its entirety.

[0261] The present invention is further illustrated by the following Examples:

### Examples

### General

[0262] Standard genetic techniques, such as overexpression of enzymes in the host cells, as well as for additional genetic modification of host cells, are known methods in the art, such as described in Sambrook and Russel (2001) “Molecular Cloning: A Laboratory Manual (3^{rd} edition), Cold Spring Harbor Laboratory, Cold Spring Harbor Laboratory Press, or F. Ausubel et al, eds., “Current protocols in molecular biology”, Green Publishing and Wiley Interscience, New York (1987). Methods for transformation and genetic modification of fungal host cells are known from e.g. EP-A-0 635 574, WO 98/46772, WO 99/60102 and WO 00/37671.

[0263] A description of the sequences is set out in Table 1. Sequences described herein may be defined with reference to the sequence listing or with reference to the database accession numbers also set out in Table 1.

### Example 1

### Over-Expression of ERG20, BTS1 and tHMG in S. cerevisiae

[0264] For over-expression of ERG20, BTS1 tHMG1, expression cassettes were designed to be integrated in one locus using technology described in co-pending patent application no. PCT/EP2013/056623. To amplify the 5′ and 3′ integration flanks for the integration locus, suitable primers and genomic DNA from a CEN.PK yeast strain (van Dijken et al. Enzyme and Microbial Technology 26 (2000) 706-714) was used. The different genes were ordered as cassettes (containing homologous sequence, promoter, gene, terminator, homologous sequence) at DNA2.0. The genes in these cassettes were flanked by constitutive promoters and terminators. See Table 2. Plasmid DNA from DNA2.0 containing the ERG20, tHMG1 and BTS1 cassettes were dissolved to a concentration of 100 ng/μl. In a 50 μl PCR mix 20 ng template was used together with 20 μmol of the primers. The material was dissolved to a concentration of 0.5 μg/μl.

TABLE 2
Composition of the over-expression constructs.

| Promoter | ORF | Terminator |
|---|---|---|
| Eno2 (SEQ ID NO: 201) | Erg20 (SEQ ID NO: 81) | Adh |
| | | (SEQ ID NO: 212) |
| Fba1 (SEQ ID NO: 202) | tHMG1 | Adh2 |
| | (SEQ ID NO: 79) | (SEQ ID NO: 213) |
| Tef1 (SEQ ID NO: 203) | Bts1 (SEQ ID NO: 83) | Gmp1 |
| | | (SEQ ID NO: 214) |

[0265] For amplification of the selection marker, the pUG7-EcoRV construct (FIG. 1) and suitable primers were used. The KanMX fragment was purified from gel using the Zymoclean Gel DNA Recovery kit (ZymoResearch). Yeast strain Cen.PK113-3C was transformed with the fragments listed in Table 3.

TABLE 3
DNA fragments used for transformation of ERG20, tHMG1 and BTS1
Fragment

5′YPRcTau3
ERG20 cassette
tHMG1 cassette
KanMX cassatte
BTS1 cassette
3′YPRcTau3

[0266] After transformation and recovery for 2.5 hours in YEPhD (yeast extract phytone peptone glucose; BBL Phytone Peptone from BD) at 30° C. the cells were plated on YEPhD agar with 200 μg/ml G418 (Sigma). The plates were incubated at 30° C. for 4 days. Correct integration was established with diagnostic PCR and sequencing. Over-expression was confirmed with LC/MS on the proteins. The schematic of the assembly of ERG20, tHMG1 and BTS1 is illustrated in FIG. 2. This strain is named STV002.

[0267] Expression of the CRE-recombinase in this strain led to out-recombination of the KanMX marker. Correct out-recombination, and presence of ERG20, tHMG and BTS1 was established with diagnostic PCR.

### Example 2

### Knock Down of Erg9

[0268] For reducing the expression of Erg9, an Erg9 knock down construct was designed and used that contains a modified 3′ end, that continues into the TRP1 promoter driving TRP1 expression.

[0269] The construct containing the Erg9-KD fragment was transformed to E. coli TOP10 cells. Transformants were grown in 2PY (2 times Phytone peptone Yeast extract), sAMP medium. Plasmid DNA was isolated with the QIAPREP Spin Miniprep kit (Qiagen) and digested with Sall-HF (New England Biolabs). To concentrate, the DNA was precipitated with ethanol. The fragment was transformed to S. cerevisiae, and colonies were plated on mineral medium (Verduyn et al, 1992. Yeast 8:501-517) agar plates without tryptophan. Correct integration of the Erg9-KD construct was confirmed with diagnostic PCR and sequencing. The schematic of performed transformation of the Erg9-KD construct is illustrated in FIG. 3. The strain was named STV003.

### Example 3

### Over-Expression of UGT2 La

[0270] For over-expression of UGT2_1a, technology was used as described in co-pending patent application PCT/EP2013/056623 and PCT/EP2013/055047. The UGT2_1a was ordered as a cassette (containing homologous sequence, promoter, gene, terminator, homologous sequence) at DNA2.0. For details, see Table 4. To obtain the fragments containing the marker and Cre-recombinase, technology was used as described in co-pending patent application no. PCT/EP2013/055047. The NAT marker, conferring resistance to nourseothricin was used for selection.

TABLE 4
Composition of the over-expression construct

| Promoter | ORF | Terminator |
|---|---|---|
| Pgk1 (SEQ ID | UGT2_1a (SEQ | Adh2 (SEQ ID |
| NO: 204) | ID NO: 87) | NO: 213) |

[0271] Suitable primers were used for amplification. To amplify the 5′ and 3′ integration flanks for the integration locus, suitable primers and genomic DNA from a CEN.PK yeast strain was used.

[0272] S. cerevisiae yeast strain STV003 was transformed with the fragments listed in Table 5, and the transformation mix was plated on YEPhD agar plates containing 50 μg/ml nourseothricin (Lexy NTC from Jena Bioscience).

TABLE 5
DNA fragments used for transformation of UGT2_1a
Fragment

5′Chr09.01
UGT2_1a cassette
NAT-CR
RE
3′Chr09.01

[0273] Expression of the CRE recombinase is activated by the presence of galactose. To induce the expression of the CRE recombinase, transformants were restreaked on YEPh Galactose medium. This resulted in out-recombination of the marker(s) located between lox sites. Correct integration of the UGT2a and out-recombination of the NAT marker was confirmed with diagnostic PCR. The resulting strain was named STV004. The schematic of the performed transformation of the UGT2_1a construct is illustrated in FIG. 4.

### Example 4

### Over-Expression of Production Pathway to RebA: CPS, KS, KO, KAH, CPR, UGT1, UGT3 and UGT4

[0274] All pathway genes leading to the production of RebA were designed to be integrated in one locus using technology described in co-pending patent application no. PCT/EP2013/056623. To amplify the 5′ and 3′ integration flanks for the integration locus, suitable primers and genomic DNA from a CEN.PK yeast strain was used. The different genes were ordered as cassettes (containing homologous sequence, promoter, gene, terminator, homologous sequence) at DNA2.0 (see Table 6 for overview). The DNA from DNA2.0 was dissolved to 100 ng/μl. This stock solution was further diluted to 5 ng/μl, of which 1 μl was used in a 50 μl-PCR mixture. The reaction contained 25 μmol of each primer. After amplification, DNA was purified with the NucleoSpin 96 PCR Clean-up kit (Macherey-Nagel) or alternatively concentrated using ethanol precipitation.

TABLE 6
Sequences used for production pathway to RebA

| Promoter | ORF | SEQ ID | Terminator |
|---|---|---|---|
| Kl prom 12.pro | trCPS_SR | 61 | Sc ADH2.ter(SEQ |
| (SEQ ID NO: 205) | | | ID NO:) |
| Sc PGK1.pro (SEQ | trKS_SR | 65 | Sc TAL1.ter (SEQ |
| ID NO: 204) | | | ID NO: 215) |
| Sc ENO2.pro (SEQ | KO_Gibfu | 85 | Sc TPI1.ter (SEQ ID |
| ID NO: 201) | | | NO: 216) |
| Ag lox_TEF1.pro | KANMX | 211 | Ag TEF1_lox.ter |
| (SEQ ID NO: 206) | | | (SEQ ID NO: 217) |
| Sc TEF1.pro (SEQ | KAH_4 | 33 | Sc GPM1.ter (SEQ |
| ID NO: 203) | | | ID NO: 214) |
| Kl prom 6.pro | CPR_3 | 57 | Sc PDC1.ter (SEQ |
| (SEQ ID NO: 207) | | | ID NO: 218) |
| Kl prom 3.pro | UGT1_SR | 71 | Sc TDH1.ter (SEQ |
| (SEQ ID NO: 221) | | | ID NO: 219) |
| Kl prom 2.pro | UGT3_SR | 73 | Sc ADH1.ter (SEQ |
| (SEQ ID NO: 222) | | | ID NO: 212) |
| Sc FBA1.pro (SEQ | UGT4_SR | 75 | Sc ENO1.ter (SEQ |
| ID NO: 202) | | | ID NO: 220) |

[0275] All fragments for the pathway to RebA, the marker and the flanks (see overview in Table 7) were transformed to S. cerevisiae yeast strain STV004. After overnight recovery in YEPhD at 20° C. the transformation mixes were plated on YEPhD agar containing 200 μg/ml G418. These were incubated 3 days at 25° C. and one night at RT.

TABLE 7
DNA fragments used for transformation of CPS, KS, KO, KanMX,
KAH, CPR, UGT1, UGT3 and UGT4.
Fragment

5′INT1
CPS cassette
KS cassette
KO cassette
KanMX cassette
KAH cassette
CPR cassette
UGT1 cassette
UGT3 cassette
UGT4 cassette
3′INT1

[0276] Correct integration was confirmed with diagnostic PCR and sequence analysis (3500 Genetic Analyzer, Applied Biosystems). The sequence reactions were done with the BigDye Terminator v3.1 Cycle Sequencing kit (Life Technologies). Each reaction (10 μl) contained 50 ng template and 3.2 μmol primer. The products were purified by ethanol/EDTA precipitation, dissolved in 10 μl HiDi formamide and applied onto the apparatus. The strain was named STV006. The schematic of how the pathway from GGPP to RebA is integrated into the genome is illustrated in FIG. 5.

### Example 5

### KO and CPR Enzyme Variants

[0277] A further strain, STV016, was made as described in Example 6, using the same CPS, KS, KAH, UGT1, UGT3 and UGT4 cassettes, but different variants of the KO and CPR gene. The KO gene was placed under the control of the same Sc ENO2.pro promoter and Sc TPI1.ter terminator as described in Example 4. The CPR gene was placed under the control of the same KI prom 6.pro promoter and Sc PDC1.ter terminator as described in Example 4. The KO and CPR gene variants are described in Table 8. Table 9 summarizes the S. cerevisiae strains that were constructed.

TABLE 8
Strains with different combinations of the KO and CPR enzymes.

| Strain | KO | CPR |
|---|---|---|
| STV006 | KO_Gibfu (SEQ ID NO: 85) | CPR_3 (SEQ ID NO: 57) |
| STV016 | KO_2 (SEQ ID NO: 23) | CPR_SR (SEQ ID NO: 59) |

TABLE 9
S. cerevisiae strains

| Strain | Background | Genotype |
|---|---|---|
| Cen.PK113- | — | MATa URA3 HIS3 LEU2 trp1-289 MAL2-8C SUC2 |
| 3C | | |
| STV002 | Cen.PK113- | MATa URA3 HIS3 LEU2 trp1-289 MAL2-8C SUC2 YPRcTau3::ERG20, |
| | 3C | tHMG1, KanMX, BTS1 |
| STV003 | STV002 | MATa URA3 HIS3 LEU2 trp1-289 MAL2-8C SUC2 YPRcTau3::ERG20, |
| | | tHMG1, KanMX, BTS1 ERG9::ERG9-KD TRP1 |
| STV004 | STV003 | MATa URA3 HIS3 LEU2 trp1-289 MAL2-8C SUC2 YPRcTau3::ERG20, |
| | | tHMG1, BTS1 ERG9::ERG9-KD TRP1 Chr09.01::UGT91D2 |
| STV006 | STV004 | MATa URA3 HIS3 LEU2 trp1-289 MAL2-8C SUC2 YPRcTau3::ERG20, |
| | | tHMG1, BTS1 ERG9::ERG9-KD TRP1 Chr09.01::UGT91D2 INT1::CPS, KS, |
| | | KO, KanMX, KAH, CPR, UGT1, UGT3, UGT4 |
| STV016 | STV004 | MATa URA3 HIS3 LEU2 trp1-289 MAL2-8C SUC2 YPRcTau3::ERG20, |
| | | tHMG1, BTS1 ERG9::ERG9-KD TRP1 Chr09.01::UGT2 INT1::CPS, KS, KO, |
| | | KanMX, KAH, CPR, UGT1, UGT3, UGT4 |

### Example 6

### Construction of Steviol Producing Strains of Recombinant Yarrowia lipolvtica

[0278] Plasmids pMB6754, pMB6761, and pMB6762 (see Table 10 and FIGS. 6, 7 and 8) encoding genes for the synthesis of steviol were constructed as follows. Open reading frames for tCPS (SEQ ID NO: 182), tKS (SEQ ID NO: 183), CPSKS (SEQ ID NO: 184), KOGib (SEQ ID NO: 186), KAH4 (SEQ ID NO: 185), CPR1 (SEQ ID NO: 187) and CPR3 (SEQ ID NO: 188) were codon pair optimized using codon pair optimisation technology as disclosed in PCT/EP2007/05594, for expression in Yarrowia lipolytica.

[0279] The optimized sequences, flanked by 60 bp of the desired promoter and terminator, were synthesized by GenScript (SEQ ID NOS: 182-188), and amplified by PCR using appropriate primers. DNA fragments encoding terminator-promoter sequences, TPI promoter, or Yarrowia lipolytica markers were amplified by PCR from existing constructs (SEQID 193-197 and 199). Vector DNA (SEQID 198), consisting of the S. cerevisiae centromere-based URA3 plasmid YCp50 (Rose et al., Gene 1987; 60(2-3):237-43) with ENOp from Yarrowia replacing the tet gene using standard techniques, was prepared from E. coli and digested with Xbal and SnaBl. All fragments were purified by gel electrophoresis using a QiaQuick kit (Qiagen). S. cerevisiae strain 10556-23C (W303 background; G. R. Fink) was transformed (Gietz and Schiestl, Nat. Protoc. 2007; 2(1): 31-4) with 250 ng of each DNA fragment and selected for prototrophy on minimal glucose aspartate medium. Plasmids were rescued from prototrophic transformants (Nucleic Acids Research, Vol. 20, No. 14, p. 3790 (1992)) and used to transform E. coli DH5α to ampicillin resistance (100 mg/L) on LB agar plates.

[0280] Yarrowia strain ML2597 with increased expression of geranylgeranyldiphosphate synthase was obtained by transformation of MF350 with pMB4591 (tef1-GGS URA2) (U.S. Pat. No. 7,851,199). Plasmids pMB6754, pMB6761, and pMB6762 were digested with Sfil and used to transform ML2597 to leucine prototrophy on minimal glucose aspartate medium containing adenine (0.2 mM). Transformants were restreaked to selective medium and subsequently inoculated to 0.8 ml YPD in 24 well microtiter plates (MTP). Plates were sealed with a BugStopper mat (Whatman) and strains were grown for steviol production at 30° C. with shaking at 800 rpm for six days in a Multitron incubator (Infors)—see Table 11.

TABLE 10
Steviol & RebA pathway plasmids

| Plasmid | SEQIDs | Genotype (partial) |
|---|---|---|
| pMB6754 | 184, 185, 186, 187, 194, | CPSKS, KAH_4, |
| | 195, 196, 197, 198, 199 | KO_Gib, CPR_1, LEU2 |
| pMB6761 | 184, 185, 186, 188, 194, | tCPS, tKS, KAH_4, |
| | 195, 196, 197, 198, 199 | KO_Gib, CPR_1, LEU2 |
| pMB6762 | 182, 183, 185, 186, 188, 193, | tCPS, tKS, KAH_4, |
| | 194, 195, 196, 197, 198, 199 | KO_Gib, CPR_3, LEU2 |
| pMB6775 | 189, 190, 191, 192, 194, | UGT1, UGT3, |
| | 195, 196, 198, 199, 200 | UGT4, UGT2, HPH |

TABLE 11
Steviol production strains

| Strain | Plasmid |
|---|---|
| ML12925 | pMB6754 |
| ML12927 | pMB6754 |
| ML12929 | pMB6162 |
| ML12930 | pMB6162 |
| ML12931 | pMB6761 |
| ML12932 | pMB6761 |

### Example 7

### Construction of RebA Producing Strains of Recombinant Yarrowia lipolytica

[0281] Plasmid pMB6775 (see Table 10 and FIG. 9) encoding genes for the synthesis of RebA was constructed as follows. Open reading frames for a UGT1, UGT3, UGT4, and UGT2 were codon pair optimized using codon pair optimisation technology as disclosed in PCT/EP2007/05594, for expression in Yarrowia lipolytica. The optimized sequences, flanked by 60 bp of the desired promoter and terminator, were synthesized by GenScript (SEQ ID NOs 189-192), and amplified by PCR using appropriate primers. DNA fragments encoding terminator-promoter sequences or Yarrowia lipolytica markers were amplified by PCR from existing constructs (SEQ ID NOS: 194-196,199 and 200). The vector (SEQ ID NO: 198), consisting of the S. cerevisiae centromere-based URA3 plasmid YCp50 (Rose et al., supra) with ENOp from Yarrowia replacing the tet gene using standard techniques, was prepared from E. coli and digested with Xbal and SnaBl. All fragments were purified by gel electrophoresis using a QiaQuick kit (Qiagen). S. cerevisiae strain 10556-23C (W303 background; G. R. Fink) was transformed (Gietz and Schistl, supra) with 250 ng of each DNA fragment and selected for prototrophy on minimal glucose aspartate medium. Plasmids were rescued from prototrophic transformants (Nucleic Acids Research, Vol. 20, No. 14, p. 3790 (1992)) and used to transform E. coli DH5α to ampicillin resistance (100 mg/L) on LB agar plates.

[0282] Plasmid MB6775 was digested with Sfil and used to transform Steviol producing Yarrowia strains ML12925, ML12929, and ML12931 to hygromycin resistance (100 mg/L) on YPD agar plates. Transformants were restreaked to selective medium and subsequently inoculated to 0.8 ml YPD in 24 well microtiter plates (MTP). Plates were sealed with a BugStopper mat (Whatman) and strains are grown for steviol production at 30° C. with shaking at 800 rpm for six days in a Multitron incubator (Infors).

[0283] A RebA producing transformant of ML12929 was denoted ML12986Protrophic strains were generated from ML12986 in one of two ways. ML12986 was transformed to prototrophy with HaeIII digested pMP4637 (WO2006/102342) on YNB plates, yielding strain ML12987. Alternately, ML12986 was mated to ML5929. ML5929 {MA TA ura2 ADE1-tHMG LEU2-CarRP} was constructed by the introduction of heterologous genes under the control of the endogenous TEF1 promoter, coupled with several generations of crossbreeding. Protrophic spores were screened for RebA production, resulting in the isolation of ML13113.

### Example 8

### Production of RebA by Saccharomyces and Yarrowia

[0284] The S. cerevisiae strain STV016 and Y. lipolytica strain ML13113 constructed as described above, were cultivated in shake-flasks (2 l with 200 ml medium) for 1 days at 30° C. and 200 rpm. The medium was based on Verduyn et al. (Verduyn C, Postma E, Scheffers W A, Van Dijken J P. Yeast, 1992 July; 8(7):501-517), with modifications in the carbon and nitrogen sources, as described in Tables 12 and 13.

TABLE 12
Preculture medium composition S. cerevisiae strain STV016

| | | Concentration |
|---|---|---|
| Raw material | Formula | (g/kg) |
| Galactose | C₆H₁₂O₆ | 20.0 |
| Urea | (NH₂)₂CO | 2.3 |
| Potassium dihydrogen phosphate | KH₂PO₄ | 3.0 |
| Magnesium sulphate | MgSO₄•7H₂O | 0.5 |
| Trace element solution | | 1 |
| Vitamin solution | | 1 |

TABLE 13
Preculture medium composition Y. lipolytica strain ML13113

| | | Concentration |
|---|---|---|
| | Formula | (g/kg) |
| Raw material | | |
| Glucose.1aq | C₆H₁₂O₆•1H₂O | 22.0 |
| Urea | (NH₂)₂CO | 2.3 |
| Potassium dihydrogen | KH₂PO₄ | 3.0 |
| phosphate | | |
| Magnesium sulphate | MgSO₄•7H₂O | 0.5 |
| Trace element solution | | 1 |
| Vitamin solution | | 1 |
| Component | | |

^{a}Trace elements solution

| | | |
|---|---|---|
| EDTA | C₁₀H₁₄N₂Na₂O₈•2H₂O | 15.00 |
| Zincsulphate•7H₂O | ZnSO₄•7H₂O | 4.50 |
| Manganesechloride•2H₂O | MnCl₂•2H₂O | 0.84 |
| Cobalt (II) chloride•6H₂O | CoCl₂•6H₂O | 0.30 |
| Cupper (II) sulphate•5H₂O | CuSO₄•5H₂O | 0.30 |
| Sodium molybdenum•2H₂O | Na₂MoO₄•2H₂O | 0.40 |
| Calciumchloride•2H₂O | CaCl₂•2H₂O | 4.50 |
| Ironsulphate•7H₂O | FeSO₄•7H₂O | 3.00 |
| Boric acid | H₃BO₃ | 1.00 |
| Potassium iodide | KI | 0.10 |

^{b}Vitamin solution

| | | |
|---|---|---|
| Biotin (D−) | C₁₀H₁₆N₂O₃S | 0.05 |
| Ca D(+) panthothenate | C₁₈H₃₂CaN₂O₁₀ | 1.00 |
| Nicotinic acid | C₆H₅NO₂ | 1.00 |
| Myo-inositol | C₆H₁₂O₆ | 25.00 |
| Thiamine chloride | C₁₂H₁₈Cl₂N₄OS•xH₂O | 1.00 |
| hydrochloride | | |
| Pyridoxol hydrochloride | C₈H₁₂ClNO₃ | 1.00 |
| p-aminobenzoic acid | C₇H₇NO₂ | 0.20 |

[0285] Subsequently, 200 ml of the content of the shake-flask was transferred into a fermenter (starting volume 5 L) for S. cerevisiae strain STV016 and 12 ml of the content of the shake-flask was transferred into a fermenter (starting volume 0.3 L) for Y. lipolytica strain ML13113, which contained the medium as set out in Table 14.

TABLE 14
Composition fermentation medium

| | | Final |
|---|---|---|
| | | Concentration |
| Raw material | | (g/kg) |
| Glucose.1aq | C₆H₁₂O₆•1H₂O | 4.4 |
| Ammonium sulphate | (NH₄)₂SO₄ | 1 |
| Potassium dihydrogen phosphate | KH₂PO₄ | 10 |
| Magnesium sulphate | MgSO₄•7H₂O | 5 |
| Trace element solution | — | 8 |
| Vitamin solution | — | 8 |

[0286] The pH was controlled at 5.0 by addition of ammonia (25 wt %). Temperature was controlled at 27° C. pO₂ was controlled at 40% by adjusting the stirrer speed. Glucose concentration was kept limited by controlled feed to the fermenter as set out in Table 15.

TABLE 15
Composition of the fermentation feed medium

| | | Final Concentration |
|---|---|---|
| Raw material | Formula | (g/kg) |
| Glucose.1aq | C₆H₁₂O₆•1H₂O | 550 |
| Potassium dihydrogen | KH₂PO₄ | 15.1 |
| phosphate | | |
| Magnesium sulphate | MgSO₄•7H₂O | 7.5 |
| heptahydrate | | |
| Verduyn trace elements | | 12 |
| solution | | |
| Verduyn vitamin solution | | 12 |

[0287] A whole broth sample was washed twice with physiologic salt solution containing 8.5 g/l NaCl. The RebA concentration in whole broth and washed broth show that for the Y. lipolytica strain 93% of the RebA can be removed by washing and for the S. cerevisiae 19% of the RebA can be removed by two wash steps (see Table 16).

TABLE 16
RebA in whole broth and washed broth.

| | | | | RebA [g/l] | RebA |
|---|---|---|---|---|---|
| | Time | RebA [g/l] | RebA [g/l] | Washed | removed by |
| Strain | [h] | Supernatant | Whole Broth | Broth | washing [—] |
| ML13113 | 117 | 0.46 | 0.38 | 0.02 | 93% |
| STV016 | 121 | 0.29 | 0.71 | 0.57 | 19% |

### Example 9

### Over-Expression of ERG20, BTS1 and tHMG in S. cerevisiae

[0288] For over-expression of ERG20, BTS1 tHMG1, expression cassettes were designed to be integrated in one locus using technology described in co-pending patent application no. PCT/EP2013/056623. To amplify the 5′ and 3′ integration flanks for the integration locus, suitable primers and genomic DNA from a CEN.PK yeast strain (van Dijken et al. Enzyme and Microbial Technology 26 (2000) 706-714) was used. The different genes were ordered as cassettes (containing homologous sequence, promoter, gene, terminator, homologous sequence) at DNA2.0. The genes in these cassettes were flanked by constitutive promoters and terminators. See Table 17. Plasmid DNA from DNA2.0 containing the ERG20, tHMG1 and BTS1 cassettes were dissolved to a concentration of 100 ng/μl. In a 50 μl PCR mix 20 ng template was used together with 20 μmol of the primers. The material was dissolved to a concentration of 0.5 μg/μl.

TABLE 17
Composition of the over-expression constructs

| Promoter | ORF | Terminator |
|---|---|---|
| Eno2 | Erg20 | Adh1 |
| (SEQ ID NO: 201) | (SEQ ID NO: 81) | (SEQ ID NO: 212) |
| Fba1 | tHMG1 | Adh2 |
| (SEQ ID NO: 202) | (SEQ ID NO: 79) | (SEQ ID NO: 213) |
| Tef1 | Bts1 | Gmp1 |
| (SEQ ID NO: 203) | (SEQ ID NO: 83) | (SEQ ID NO: 214) |

[0289] For amplification of the selection marker, the pUG7-EcoRV construct (FIG. 1) and suitable primers were used. The KanMX fragment was purified from gel using the Zymoclean Gel DNA Recovery kit (ZymoResearch). Yeast strain Cen.PK113-3C was transformed with the fragments listed in Table 18.

TABLE 18
DNA fragments used for transformation of ERG20, tHMG1 and BTS1
Fragment

5′YPRcTau3
ERG20 cassette
tHMG1 cassette
KanMX cassatte
BTS1 cassette
3′YPRcTau3

[0290] After transformation and recovery for 2.5 hours in YEPhD (yeast extract phytone peptone glucose; BBL Phytone Peptone from BD) at 30° C. the cells were plated on YEPhD agar with 200 μg/ml G418 (Sigma). The plates were incubated at 30° C. for 4 days. Correct integration was established with diagnostic PCR and sequencing. Over-expression was confirmed with LC/MS on the proteins. The schematic of the assembly of ERG20, tHMG1 and BTS1 is illustrated in FIG. 2. This strain is named STV002.

[0291] Expression of the CRE-recombinase in this strain led to out-recombination of the KanMX marker. Correct out-recombination, and presence of ERG20, tHMG and BTS1 was established with diagnostic PCR.

### Example 10

### Knock Down of Erg9

[0292] For reducing the expression of Erg9, an Erg9 knock down construct was designed and used that contains a modified 3′ end, that continues into the TRP1 promoter driving TRP1 expression.

[0293] The construct containing the Erg9-KD fragment was transformed to E. coli TOP10 cells. Transformants were grown in 2PY (2 times Phytone peptone Yeast extract), sAMP medium. Plasmid DNA was isolated with the QIAprep Spin Miniprep kit (Qiagen) and digested with Sall-HF (New England Biolabs). To concentrate, the DNA was precipitated with ethanol. The fragment was transformed to S. cerevisiae, and colonies were plated on mineral medium (Verduyn et al, 1992. Yeast 8:501-517) agar plates without tryptophan. Correct integration of the Erg9-KD construct was confirmed with diagnostic PCR and sequencing. The schematic of performed transformation of the Erg9-KD construct is illustrated in FIG. 3. The strain was named STV003.

### Example 11

### Over-Expression of UGT2 La

[0294] For over-expression of UGT2_1a, technology was used as described in co-pending patent application nos. PCT/EP2013/056623 and PCT/EP2013/055047. The UGT2_1a was ordered as a cassette (containing homologous sequence, promoter, gene, terminator, homologous sequence) at DNA2.0. For details, see Table 19. To obtain the fragments containing the marker and Cre-recombinase, technology was used as described in co-pending patent application no. PCT/EP2013/055047. The NAT marker, conferring resistance to nourseothricin was used for selection.

TABLE 19
Composition of the over-expression construct

| Promoter | ORF | Terminator |
|---|---|---|
| Pgk1 | UGT2_1a | Adh2 |
| (SEQ ID NO: 204) | (SEQ ID NO: 87) | (SEQ ID NO: 213) |

[0295] Suitable primers were used for amplification. To amplify the 5′ and 3′ integration flanks for the integration locus, suitable primers and genomic DNA from a CEN.PK yeast strain was used.

[0296] S. cerevisiae yeast strain STV003 was transformed with the fragments listed in Table 20, and the transformation mix was plated on YEPhD agar plates containing 50 μg/ml nourseothricin (Lexy NTC from Jena Bioscience).

TABLE 20
DNA fragments used for transformation of UGT2 1a
Fragment

5′Chr09.01
UGT2_1a cassette
NAT-CR
RE
3′Chr09.01

[0297] Expression of the CRE recombinase is activated by the presence of galactose. To induce the expression of the CRE recombinase, transformants were restreaked on YEPh Galactose medium. This resulted in out-recombination of the marker(s) located between lox sites. Correct integration of the UGT2a and out-recombination of the NAT marker was confirmed with diagnostic PCR. The resulting strain was named STV004. The schematic of the performed transformation of the UGT2_1a construct is illustrated in FIG. 4.

### Example 12

### Over-Expression of Production Pathway to RebA: CPS, KS, KO, KAH, CPR, UGT1, UGT3 and UGT4

[0298] All pathway genes leading to the production of RebA were designed to be integrated in one locus using technology described in co-pending patent application no. PCT/EP2013/056623. To amplify the 5′ and 3′ integration flanks for the integration locus, suitable primers and genomic DNA from a CEN.PK yeast strain was used. The different genes were ordered as cassettes (containing homologous sequence, promoter, gene, terminator, homologous sequence) at DNA2.0 (see Table 21 for overview). The DNA from DNA2.0 was dissolved to 100 ng/μl. This stock solution was further diluted to 5 ng/μl, of which 1 μl was used in a 50 μl-PCR mixture. The reaction contained 25 μmol of each primer. After amplification, DNA was purified with the NucleoSpin 96 PCR Clean-up kit (Macherey-Nagel) or alternatively concentrated using ethanol precipitation.

TABLE 21
Sequences used for production pathway to RebA

| Promoter | ORF | SEQ ID | Terminator |
|---|---|---|---|
| Kl prom 12.pro | trCPS_SR | 61 | Sc ADH2.ter |
| (SEQ ID NO: 205) | | | (SEQ ID NO:) |
| Sc PGK1.pro | trKS_SR | 65 | Sc TAL1.ter |
| (SEQ ID NO: 204) | | | (SEQ ID NO: 215) |
| Sc ENO2.pro | KO_2 | 23 | Sc TPI1.ter |
| (SEQ ID NO: 201) | | | (SEQ ID NO: 216) |
| Ag lox_TEF1.pro | KANMX | 211 | Ag TEF1_lox.ter |
| (SEQ ID NO: 206) | | | (SEQ ID NO: 217) |
| Sc TEF1.pro | KAH_4 | 33 | Sc GPM1.ter |
| (SEQ ID NO: 203) | | | (SEQ ID NO: 214) |
| Kl prom 6.pro | CPR_SR | 59 | Sc PDC1.ter |
| (SEQ ID NO: 207) | | | (SEQ ID NO: 218) |
| Kl prom 3.pro | UGT1_SR | 71 | Sc TDH1.ter |
| (SEQ ID NO: 221) | | | (SEQ ID NO: 219) |
| Sc VPS68.pro | UGT3_SR | 73 | Sc ADH1.ter |
| (SEQ ID NO: 224) | | | (SEQ ID NO: 212) |
| Sc OYE2.pro | UGT4_SR | 75 | Sc ENO1.ter |
| (SEQ ID NO: 225) | | | (SEQ ID NO: 220) |

[0299] All fragments for the pathway to RebA, the marker and the flanks (see overview in Table 22) were transformed to S. cerevisiae yeast strain STV004. After overnight recovery in YEPhD at 20° C. the transformation mixes were plated on YEPhD agar containing 200 μg/ml G418. These were incubated 3 days at 25° C. and one night at RT.

TABLE 22
DNA fragments used for transformation of CPS, KS,
KO, KanMX, KAH, CPR, UGT1, UGT3 and UGT4.
Fragment

5′INT1
CPS cassette
KS cassette
KO cassette
KanMX cassette
KAH cassette
CPR cassette
UGT1 cassette
UGT3 cassette
UGT4 cassette
3′INT1

[0300] Correct integration was confirmed with diagnostic PCR and sequence analysis (3500 Genetic Analyzer, Applied Biosystems). The sequence reactions were done with the BigDye Terminator v3.1 Cycle Sequencing kit (Life Technologies). Each reaction (10 μl) contained 50 ng template and 3.2 μmol primer. The products were purified by ethanol/EDTA precipitation, dissolved in 10 μl HiDi formamide and applied onto the apparatus. The strain was named STV040. The schematic of how the pathway from GGPP to RebA is integrated into the genome is illustrated in FIG. 5.

### Example 13

### Deletion of UGT2 from RebA Production Strain

[0301] For deletion of UGT2_1a in strain STV040, the UGT2_1a was replaced by a NAT marker and the gene encoding Cre-recombinase. This construct is illustrated in FIG. 11. The construct was flanked by sequences homologous to the integration site of UGT2_1a. To obtain the fragments containing the marker and Cre-recombinase, technology was used as described in co-pending patent application no. PCT/EP2013/055047. The NAT marker, conferring resistance to nourseothricin was used for selection. Suitable primers were used for amplification.

[0302] STV040 was transformed with the NAT and CRE constructs, and the transformation mix was plated on YEPhD agar plates containing 50 μg/ml nourseothricin (Lexy NTC from Jena Bioscience). NAT-resistant transformants were re-streaked for single isolates, and then streaked to plates containing galactose for induction of the Cre-recombinase expression. One correct UGT2_1a-free transformants was named STV055.

### Example 14

### Production of RebA and Rubusoside by Saccharomyces

[0303] The S. cerevisiae strains STV040 and STV055 constructed as described above, were cultivated in shake-flasks (0.5 l with 50 ml medium) for 1 days at 30° C. and 280 rpm. The medium was based on Verduyn et al. (Verduyn C, Postma E, Scheffers W A, Van Dijken J P. Yeast, 1992 July; 8(7):501-517), with modifications in the carbon and nitrogen sources, as described in Tables 23.

TABLE 23
Preculture medium composition

| | | Concentration |
|---|---|---|
| Raw material | Formula | (g/kg) |
| Glucose•1aq | C₆H₁₂O₆•1H₂O | 22.0 |
| Urea | (NH₂)₂CO | 2.3 |
| Potassium dihydrogen phosphate | KH₂PO₄ | 3.0 |
| Magnesium sulphate | MgSO₄•7H₂O | 0.5 |
| Trace element solution | | 1 |
| Vitamin solution | | 1 |

| | | |
|---|---|---|
| | | Concentration |
| Component | Formula | (g/kg) |

^{a}Trace elements solution

| | | |
|---|---|---|
| EDTA | C₁₀H₁₄N₂Na₂O₈•2H₂O | 15.00 |
| Zincsulphate•7H₂O | ZnSO₄•7H₂O | 4.50 |
| Manganesechloride•2H₂O | MnCl₂•2H₂O | 0.84 |
| Cobalt (II) chloride•6H₂O | CoCl₂•6H₂O | 0.30 |
| Cupper (II) sulphate•5H₂O | CuSO₄•5H₂O | 0.30 |
| Sodium molybdenum•2H₂O | Na₂MoO₄•2H₂O | 0.40 |
| Calciumchloride•2H₂O | CaCl₂•2H₂O | 4.50 |
| Ironsulphate•7H₂O | FeSO₄•7H₂O | 3.00 |
| Boric acid | H₃BO₃ | 1.00 |
| Potassium iodide | Kl | 0.10 |

^{b}Vitamin solution

| | | |
|---|---|---|
| Biotin (D−) | C₁₀H₁₆N₂O₃S | 0.05 |
| Ca D(+) panthothenate | C₁₈H₃₂CaN₂O₁₀ | 1.00 |
| Nicotinic acid | C₆H₅NO₂ | 1.00 |
| Myo-inositol | C₆H₁₂O₆ | 25.00 |
| Thiamine chloride | C₁₂H₁₈Cl₂N₄OS•xH₂O | 1.00 |
| hydrochloride | | |
| Pyridoxol hydrochloride | C₈H₁₂ClNO₃ | 1.00 |
| p-aminobenzoic acid | C₇H₇NO₂ | 0.20 |

[0304] Subsequently, 200 ml of the content of the shake-flask was transferred into a fermenter (starting volume 5 L) for S. cerevisiae strain STV016 and 12 ml of the content of the shake-flask S. cerevisiae strain STV040 and STV055 were transferred into a fermenter (starting volume 0.3 L), which contained the medium as set out in Table 24.

TABLE 24
Composition fermentation medium

| | | Final |
|---|---|---|
| | | Concentration |
| Raw material | | (g/kg) |
| Glucose•1aq | C₆H₁₂O₆•1H₂O | 4.4 |
| Ammonium sulphate | (NH₄)₂SO₄ | 1 |
| Potassium dihydrogen phosphate | KH₂PO₄ | 10 |
| Magnesium sulphate | MgSO₄•7H₂O | 5 |
| Trace element solution | — | 8 |
| Vitamin solution | — | 8 |

[0305] The pH was controlled at 5.0 by addition of ammonia (25 wt %). Temperature was controlled at 27° C. pO₂ was controlled at 40% by adjusting the stirrer speed. Glucose concentration was kept limited by controlled feed to the fermenter as set out in Table 25.

TABLE 25
Composition of the fermentation feed medium

| | | Final |
|---|---|---|
| | | Concentration |
| Raw material | Formula | (g/kg) |
| Glucose•1aq | C₆H₁₂O₆•1H₂O | 550 |
| Potassium dihydrogen | KH₂PO₄ | 15.1 |
| phosphate | | |
| Magnesium sulphate | MgSO₄•7H₂O | 7.5 |
| heptahydrate | | |
| Verduyn trace elements | | 12 |
| solution | | |
| Verduyn vitamin solution | | 12 |

[0306] RebA and rubusoside in whole broth and supernatant are shown in Table 26.

TABLE 26
RebA and Rubusoside in whole broth and supernatant.

| | | RebA | RebA | Rubusoside | Rubusoside |
|---|---|---|---|---|---|
| | Time | [g/l] | [g/l] | [g/l] | [g/l] |
| Strain | [h] | Supernatant | Whole Broth | Supernatant | Whole Broth |
| STV040 | 123 | 0.16 | 0.41 | 0.00 | 0.00 |
| STV055 | 123 | 0.00 | 0.00 | 1.83 | 1.47 |

### Example 15

### Production of RebA, RebD and Rubusoside by Saccharomyces

[0307] The S. cerevisiae strains STV016, STV040 and STV055 constructed as described above, were cultivated in shake-flasks (0.5 l with 50 ml medium) for 1 days at 30° C. and 280 rpm. The medium was based on Verduyn et al. (Verduyn C, Postma E, Scheffers W A, Van Dijken J P. Yeast, 1992 July; 8(7):501-517), with modifications in the carbon and nitrogen sources, as described in Tables 27.

TABLE 27
Preculture medium composition

| | | Concentration |
|---|---|---|
| Raw material | Formula | (g/kg) |
| Glucose•1aq | C₆H₁₂O₆•1H₂O | 22.0 |
| Urea | (NH₂)₂CO | 2.3 |
| Potassium dihydrogen phosphate | KH₂PO₄ | 3.0 |
| Magnesium sulphate | MgSO₄•7H₂O | 0.5 |
| Trace element solution | | 1 |
| Vitamin solution | | 1 |

| | | |
|---|---|---|
| | | Concentration |
| Component | Formula | (g/kg) |

^{a}Trace elements solution

| | | |
|---|---|---|
| EDTA | C₁₀H₁₄N₂Na₂O₈•2H₂O | 15.00 |
| Zincsulphate•7H₂O | ZnSO₄•7H₂O | 4.50 |
| Manganesechloride•2H₂O | MnCl₂•2H₂O | 0.84 |
| Cobalt (II) chloride•6H₂O | CoCl₂•6H₂O | 0.30 |
| Cupper (II) sulphate•5H₂O | CuSO₄•5H₂O | 0.30 |
| Sodium molybdenum•2H₂O | Na₂MoO₄•2H₂O | 0.40 |
| Calciumchloride•2H₂O | CaCl₂•2H₂O | 4.50 |
| Ironsulphate•7H₂O | FeSO₄•7H₂O | 3.00 |
| Boric acid | H₃BO₃ | 1.00 |
| Potassium iodide | Kl | 0.10 |

^{b}Vitamin solution

| | | |
|---|---|---|
| Biotin (D−) | C₁₀H₁₆N₂O₃S | 0.05 |
| Ca D(+) panthothenate | C₁₈H₃₂CaN₂O₁₀ | 1.00 |
| Nicotinic acid | C₆H₅NO₂ | 1.00 |
| Myo-inositol | C₆H₁₂O₆ | 25.00 |
| Thiamine chloride | C₁₂H₁₈Cl₂N₄OS•xH₂O | 1.00 |
| hydrochloride | | |
| Pyridoxol hydrochloride | C₈H₁₂ClNO₃ | 1.00 |
| p-aminobenzoic acid | C₇H₇NO₂ | 0.20 |

[0308] Subsequently, 12 ml of the content of the shake-flask was transferred into a fermenter (starting volume 0.3 L), which contained the medium as set out in Table 28.

TABLE 28
Composition fermentation medium

| | | Final |
|---|---|---|
| | | Concentration |
| Raw material | | (g/kg) |
| Glucose•1aq | C₆H₁₂O₆•1H₂O | 4.4 |
| Ammonium sulphate | (NH₄)₂SO₄ | 1 |
| Potassium dihydrogen phosphate | KH₂PO₄ | 10 |
| Magnesium sulphate | MgSO₄•7H₂O | 5 |
| Trace element solution | — | 8 |
| Vitamin solution | — | 8 |

[0309] The pH was controlled at 5.0 by addition of ammonia (25 wt %). Temperature was controlled at 27° C. pO₂ was controlled at 40% by adjusting the stirrer speed. Glucose concentration was kept limited by controlled feed to the fermenter as set out in Table 29.

TABLE 29
Composition of the fermentation feed medium

| | | Final |
|---|---|---|
| | | Concentration |
| Raw material | Formula | (g/kg) |
| Glucose•1aq | C₆H₁₂O₆•1H₂O | 550 |
| Potassium dihydrogen | KH₂PO₄ | 15.1 |
| phosphate | | |
| Magnesium sulphate | MgSO₄•7H₂O | 7.5 |
| heptahydrate | | |
| Verduyn trace elements | | 12 |
| solution | | |
| Verduyn vitamin solution | | 12 |

[0310] RebA and rubusoside in whole broth and supernatant are shown in Table 30.

TABLE 30
RebA, RebD and Rubusoside in whole broth and supernatant.

| Strain | STV016 | STV040 | STV055 |
|---|---|---|---|
| Time [h] | 121 | 123 | 123 |
| RebA [g/l] | 0.29 | 0.16 | 0.00 |
| Supernatant | | | |
| RebA [g/l] | 0.71 | 0.41 | 0.00 |
| Whole Broth | | | |
| Rubusoside [g/l] | 0.01 | 0.00 | 1.83 |
| Supernatant | | | |
| Rubusoside [g/l] | 0.00 | 0.00 | 1.47 |
| Whole Broth | | | |
| RebD [g/l] | 0.00 | 0.04 | 0.00 |
| Supernatant | | | |
| RebD [g/l] | 0.00 | 0.30 | 0.00 |
| Whole Broth | | | |

TABLE 1
Description of the sequence listing

| Nucleic acid | Nucleic acid | | | | |
|---|---|---|---|---|---|
| (CpO for | (CpO for | Amino | | | |
| S. cerevisiae) | Y. lipolytica) | acid | Id* | UniProt\hat{ } | Organism |
| SEQ ID NO: | SEQ ID NO: | SEQ ID NO: | CPS_1 | Q9FXV9 | Lactuca sativa (Garden |
| 1 | 151 | 2 | | | Lettuce) |
| SEQ ID NO: | SEQ ID NO: | SEQ ID NO: | tCPS_1 | [symbol] | Lactuca sativa (Garden |
| 3 | 152 | 4 | | | Lettuce) |
| SEQ ID NO: | SEQ ID NO: | SEQ ID NO: | CPS_2 | D2X8G0 | Picea glauca |
| 5 | 153 | 6 | | | |
| SEQ ID NO: | SEQ ID NO: | SEQ ID NO: | CPS_3 | Q45221 | Bradyrhizobium |
| 7 | 154 | 8 | | | japonicum |
| SEQ ID NO: | SEQ ID NO: | SEQ ID NO: | KS_1 | Q9FXV8 | Lactuca sativa (Garden |
| 9 | 155 | 10 | | | Lettuce) |
| SEQ ID NO: | SEQ ID NO: | SEQ ID NO: | tKS_1 | [symbol] | Lactuca sativa (Garden |
| 11 | 156 | 12 | | | Lettuce) |
| SEQ ID NO: | SEQ ID NO: | SEQ ID NO: | KS_2 | D2X8G1 | Picea glauca |
| 13 | 157 | 14 | | | |
| SEQ ID NO: | SEQ ID NO: | SEQ ID NO: | KS_3 | Q45222 | Bradyrhizobium |
| 15 | 158 | 16 | | | japonicum |
| SEQ ID NO: | SEQ ID NO: | SEQ ID NO: | CPSKS_1 | O13284 | Phaeosphaeria sp |
| 17 | 159 | 18 | | | |
| SEQ ID NO: | SEQ ID NO: | SEQ ID NO: | CPSKS_2 | Q9UVY5 | Gibberella fujikuroi |
| 19 | 160 | 20 | | | |
| SEQ ID NO: | SEQ ID NO: | SEQ ID NO: | KO_1 | B5MEX5 | Lactuca sativa (Garden |
| 21 | 161 | 22 | | | Lettuce) |
| SEQ ID NO: | SEQ ID NO: | SEQ ID NO: | KO_2 | B5MEX6 | Lactuca sativa (Garden |
| 23 | 162 | 24 | | | Lettuce) |
| SEQ ID NO: | SEQ ID NO: | SEQ ID NO: | KO_3 | B5DBY4 | Sphaceloma manihoticola |
| 25 | 163 | 26 | | | |
| SEQ ID NO: | SEQ ID NO: | SEQ ID NO: | KAH_1 | Q2HYU7 | Artemisia annua (Sweet |
| 27 | 164 | 28 | | | wormwood). |
| SEQ ID NO: | SEQ ID NO: | SEQ ID NO: | KAH_2 | B9SBP0 | Ricinus communis (Castor |
| 29 | 165 | 30 | | | bean). |
| SEQ ID NO: | SEQ ID NO: | SEQ ID NO: | KAH_3 | Q0NZP1 | Stevia rebaudiana |
| 31 | 166 | 32 | | | |
| SEQ ID NO: | SEQ ID NO: | SEQ ID NO: | KAH_4 | JP20090658 | Arabidopsis thaliana |
| 33 | 167 | 34 | | 86 | (Mouse-ear cress) |
| SEQ ID NO: | SEQ ID NO: | SEQ ID NO: | UGT1_1 | A9X3L6 | Ixeris dentata var. |
| 35 | 168 | 36 | | | albiflora. |
| SEQ ID NO: | SEQ ID NO: | SEQ ID NO: | UGT1_2 | B9SIN2 | Ricinus communis (Castor |
| 37 | 169 | 38 | | | bean). |
| SEQ ID NO: | SEQ ID NO: | SEQ ID NO: | UGT3_1 | A9X3L7 | Ixeris dentata var. |
| 39 | 170 | 40 | | | Albiflora |
| SEQ ID NO: | SEQ ID NO: | SEQ ID NO: | UGT3_2 | B9IEM5 | Populus trichocarpa |
| 41 | 171 | 42 | | | (Western balsam poplar) |
| SEQ ID NO: | SEQ ID NO: | SEQ ID NO: | UGT3_3 | Q9M6E7 | Nicotiana tabacum |
| 43 | 172 | 44 | | | |
| SEQ ID NO: | SEQ ID NO: | SEQ ID NO: | UGT3_4 | A3E7Y9 | Vaccaria hispanica |
| 45 | 173 | 46 | | | |
| SEQ ID NO: | SEQ ID NO: | SEQ ID NO: | UGT3_5 | P10249 | Streptococcus mutans |
| 47 | 174 | 48 | | | |
| SEQ ID NO: | SEQ ID NO: | SEQ ID NO: | UGT4_1 | A4F1T4 | Lobelia erinus (Edging |
| 49 | 175 | 50 | | | lobelia) |
| SEQ ID NO: | SEQ ID NO: | SEQ ID NO: | UGT4_2 | Q9M052 | Arabidopsis thaliana |
| 51 | 176 | 52 | | | (Mouse-ear cress) |
| SEQ ID NO: | SEQ ID NO: | SEQ ID NO: | CPR_1 | Q7Z8R1 | Gibberella fujikuroi |
| 53 | 177 | 54 | | | |
| SEQ ID NO: | SEQ ID NO: | SEQ ID NO: | CPR_2 | Q9SB48 | Arabidopsis thaliana |
| 55 | 178 | 56 | | | (Mouse-ear cress) |
| SEQ ID NO: | SEQ ID NO: | SEQ ID NO: | CPR_3 | Q9SUM3 | Arabidopsis thaliana |
| 57 | 179 | 58 | | | (Mouse-ear cress) |
| SEQ ID NO: | SEQ ID NO: | SEQ ID NO: | CPS_SR | O22667 | Stevia rebaudiana |
| 59 | 141 | 60 | | | |
| SEQ ID NO: | SEQ ID NO: | SEQ ID NO: | tCPS_SR | [symbol] | Stevia rebaudiana |
| 61 | 142 | 62 | | | |
| SEQ ID NO: | SEQ ID NO: | SEQ ID NO: | KS_SR | Q9XEI0 | Stevia rebaudiana |
| 63 | 143 | 64 | | | |
| SEQ ID NO: | SEQ ID NO: | SEQ ID NO: | tKS_SR | [symbol] | Stevia rebaudiana |
| 65 | 144 | 66 | | | |
| SEQ ID NO: | SEQ ID NO: | SEQ ID NO: | KO_SR | Q4VCL5 | Stevia rebaudiana |
| 67 | 145 | 68 | | | |
| SEQ ID NO: | SEQ ID NO: | SEQ ID NO: | KAH_SR | [symbol] | Stevia rebaudiana |
| 69 | 146 | 70 | | | |
| SEQ ID NO: | SEQ ID NO: | SEQ ID NO: | UGT1_SR | Q6VAB0 | Stevia rebaudiana |
| 71 | 147 | 72 | | | |
| SEQ ID NO: | SEQ ID NO: | SEQ ID NO: | UGT3_SR | Q6VAA6 | Stevia rebaudiana |
| 73 | 148 | 74 | | | |
| SEQ ID NO: | SEQ ID NO: | SEQ ID NO: | UGT4_SR | Q6VAB4 | Stevia rebaudiana |
| 75 | 149 | 76 | | | |
| SEQ ID NO: | SEQ ID NO: | SEQ ID NO: | CPR_SR | Q2I6J8 | Stevia rebaudiana |
| 77 | 150 | 78 | | | |
| SEQ ID NO: | | SEQ ID NO: | tHMG1 | G2WJY0 | Saccharomyces cerevisiae |
| 79 | | 80 | | | |
| SEQ ID NO: | | SEQ ID NO: | ERG20 | E7LW73 | Saccharomyces cerevisiae |
| 81 | | 82 | | | |
| SEQ ID NO: | | SEQ ID NO: | BTS1 | E7Q9V5 | Saccharomyces cerevisiae |
| 83 | | 84 | | | |
| SEQ ID NO: | SEQ ID NO: | SEQ ID NO: | KO_Gibfu | O94142 | Gibberella fujikuroi |
| 85 | 180 | 86 | | | |
| SEQ ID NO: | SEQ ID NO: | SEQ ID NO: | UGT2_1a | [symbol] | Stevia rebaudiana |
| 87 | 181 | 88 | | | |
| SEQ ID NO: | | SEQ ID NO: | KAH_ASR1 | Xxx | S. rebaudiana |
| 89 | | 90 | | | |
| SEQ ID NO: | | SEQ ID NO: | KAH_ASR2 | Q0NZP1_STE | S. rebaudiana |
| 91 | | 92 | | RE | |
| SEQ ID NO: | | SEQ ID NO: | KAH_AAT | Q6NKZ8_AR | A. thaliana |
| 93 | | 94 | | ATH | |
| SEQ ID NO: | | SEQ ID NO: | KAH_AVV | [symbol] | Vitis vinifera |
| 95 | | 96 | | [symbol] | |
| SEQ ID NO: | | SEQ ID NO: | KAH_AMT | Q2MJ20_ME | Medicago truncatula |
| 97 | | 98 | | DTR | |
| SEQ ID NO: | | SEQ ID NO: | UGT2_1b | [symbol] | S. rebaudiana |
| 99 | | 100 | | | |
| SEQ ID NO: | | SEQ ID NO: | UGT2_2 | Q53UH5_IPO | I. purpurea |
| 101 | | 102 | | PU | |
| SEQ ID NO: | | SEQ ID NO: | UGT2_3 | [symbol] | Bellis perennis |
| 103 | | 104 | | [symbol] | |
| SEQ ID NO: | | SEQ ID NO: | UGT2_4 | B3VI56 | S. rebaudiana |
| 105 | | 106 | | | |
| SEQ ID NO: | | SEQ ID NO: | UGT2_5 | Q6VAA8 | S. rebaudiana |
| 107 | | 108 | | | |
| SEQ ID NO: | | SEQ ID NO: | UGT2_6 | Q8LKG3 | S. rebaudiana |
| 109 | | 110 | | | |
| SEQ ID NO: | | SEQ ID NO: | UGT2_7 | B9HSH7_PO | Populus trichocarpa |
| 111 | | 112 | | PTR | |
| SEQ ID NO: | | SEQ ID NO: | UGT_RD1 | Q6VAA3 | S. rebaudiana |
| 113 | | 114 | | | |
| SEQ ID NO: | | SEQ ID NO: | UGT_RD2 | Q8H6A4 | S. rebaudiana |
| 115 | | 116 | | | |
| SEQ ID NO: | | SEQ ID NO: | UGT_RD3 | Q6VAA4 | S. rebaudiana |
| 117 | | 118 | | | |
| SEQ ID NO: | | SEQ ID NO: | UGT_RD4 | Q6VAA5 | S. rebaudiana |
| 119 | | 120 | | | |
| SEQ ID NO: | | SEQ ID NO: | UGT_RD5 | Q6VAA7 | S. rebaudiana |
| 121 | | 122 | | | |
| SEQ ID NO: | | SEQ ID NO: | UGT_RD6 | Q6VAA8 | S. rebaudiana |
| 123 | | 124 | | | |
| SEQ ID NO: | | SEQ ID NO: | UGT_RD7 | Q6VAA9 | S. rebaudiana |
| 125 | | 126 | | | |
| SEQ ID NO: | | SEQ ID NO: | UGT_RD8 | Q6VAB1 | S. rebaudiana |
| 127 | | 128 | | | |
| SEQ ID NO: | | SEQ ID NO: | UGT_RD9 | Q6VAB2 | S. rebaudiana |
| 129 | | 130 | | | |
| SEQ ID NO: | | SEQ ID NO: | UGT_RD10 | Q6VAB3 | S. rebaudiana |
| 131 | | 132 | | | |
| SEQ ID NO: | | SEQ ID NO: | UGT_RD11 | B9VVB1 | S. rebaudiana |
| 133 | | 134 | | | |
| SEQ ID NO: | | SEQ ID NO: | UGT_RD12 | C7EA09 | S. rebaudiana |
| 135 | | 136 | | | |
| SEQ ID NO: | | SEQ ID NO: | UGT_RD13 | Q8LKG3 | S. rebaudiana |
| 137 | | 138 | | | |
| SEQ ID NO: | | SEQ ID NO: | UGT_RD14 | B3VI56 | S. rebaudiana |
| 139 | | 140 | | | |
| | SEQ ID NO: | | tCPS | | |
| | 182 | | | | |
| | SEQ ID NO: | | tKS | | |
| | 183 | | | | |
| | SEQ ID NO: | | CPSKS | | |
| | 184 | | | | |
| | SEQ ID NO: | | KAH4 | | |
| | 185 | | | | |
| | SEQ ID NO: | | KO_Gibfu | | |
| | 186 | | | | |
| | SEQ ID NO: | | CPR1 | | |
| | 187 | | | | |
| | SEQ ID NO: | | CPR3 | | |
| | 188 | | | | |
| | SEQ ID NO: | | UGT1 | | |
| | 189 | | | | |
| | SEQ ID NO: | | UGT3 | | |
| | 190 | | | | |
| | SEQ ID NO: | | UGT4 | | |
| | 191 | | | | |
| | SEQ ID NO: | | UGT2_1a | | |
| | 192 | | | | |
| | SEQ ID NO: | | pTPI | | |
| | 193 | | | | |
| | SEQ ID NO: | | gpdT-pGPD | | |
| | 194 | | | | |
| | SEQ ID NO: | | pgmT-pTEF | | |
| | 195 | | | | |
| | SEQ ID NO: | | pgkT-pPGM | | |
| | 196 | | | | |
| | SEQ ID NO: | | LEU2 and | | |
| | 197 | | flanking | | |
| | | | sequences | | |
| | SEQ ID NO: | | vector sequences | | |
| | 198 | | | | |
| | SEQ ID NO: | | pENO | | |
| | 199 | | | | |
| | SEQ ID NO: | | HPH | | |
| | 200 | | | | |
| SEQ ID NO: | | | Sc Eno2.pro | | |
| 201 | | | | | |
| SEQ ID NO: | | | Sc Fba1.pro | | |
| 202 | | | | | |
| SEQ ID NO: | | | Sc Tef1.pro | | |
| 203 | | | | | |
| SEQ ID NO: | | | Sc Pgk1.pro | | |
| 204 | | | | | |
| SEQ ID NO: | | | Kl prom 12.pro | | |
| 205 | | | | | |
| SEQ ID NO: | | | Ag lox_TEF1.pro | | |
| 206 | | | | | |
| SEQ ID NO: | | | Kl prom 6.pro | | |
| 207 | | | | | |
| SEQ ID NO: | | | Sc Pma1.pro | | |
| 208 | | | | | |
| SEQ ID NO: | | | Sc Vps68.pro | | |
| 209 | | | | | |
| SEQ ID NO: | | | Sc Oye2.pro | | |
| 210 | | | | | |
| SEQ ID NO: | | | KANMX ORF | | |
| 211 | | | | | |
| SEQ ID NO: | | | Adh1.ter | | |
| 212 | | | | | |
| SEQ ID NO: | | | Adh2.ter | | |
| 213 | | | | | |
| SEQ ID NO: | | | Gmp1.ter | | |
| 214 | | | | | |
| SEQ ID NO: | | | Sc Tal1.ter | | |
| 215 | | | | | |
| SEQ ID NO: | | | Sc Tpi1.ter | | |
| 216 | | | | | |
| SEQ ID NO: | | | Ag Tef1_lox.ter | | |
| 217 | | | | | |
| SEQ ID NO: | | | Sc Pdc1.ter | | |
| 218 | | | | | |
| SEQ ID NO: | | | Sc Tdh1.ter | | |
| 219 | | | | | |
| SEQ ID NO: | | | Sc Eno1.ter | | |
| 220 | | | | | |
| SEQ ID NO: | | | Kl prom3.pro | | |
| 221 | | | | | |
| SEQ ID NO: | | | Kl prom2.pro | | |
| 222 | | | | | |
| SEQ ID NO: | | | Sc PRE3. Pro | | |
| 223 | | | | | |
| SEQ ID NO: | | | Sc VPS68.pro | | |
| 224 | | | | | |
| SEQ ID NO: | | | Sc OYE2.pro | | |
| 225 | | | | | |

greyed out ids are truncated and thus a fragment of mentioned UniProt id

1. A method for the production of a diterpene or a glycosylated diterpene, which method comprises:
a. fermenting a recombinant microorganism in a suitable fermentation medium,
wherein the microorganism comprises one or more nucleotide sequence(s) encoding: a polypeptide having ent-copalyl pyrophosphate synthase activity; a polypeptide having ent-Kaurene synthase activity; a polypeptide having ent-Kaurene oxidase activity; and a polypeptide having kaurenoic acid 13-hydroxylase activity and whereby expression of the nucleotide sequence(s) confer(s) on the microorganism the ability to produce at least steviol,
whereby a diterpene or glycosylated diterpene is produced extracellularly in the fermentation medium; and
b. recovering the diterpene or glycosylated diterpene from the fermentation medium.

2. A method according to claim 1, wherein the recombinant microorganism comprises one or more nucleotide sequences encoding a polypeptide having UDP-glucosyltransferase activity,
whereby expression of the nucleotide sequence(s) confer(s) on the microorganism the ability to produce at least one of steviolmonoside, steviolbioside, stevioside or rebaudioside A, rebaudioside B, rebaudioside C, rebaudioside D, rebaudioside E, rebaudioside F, rubusoside, dulcoside A.

3. A method according to claim 2, wherein the recombinant microorganism comprises a nucleotide sequence encoding a polypeptide capable of catalyzing the addition of a C-13-glucose to steviol,
whereby expression of the nucleotide sequence confers on the microorganism the ability to produce at least steviolmonoside.

4. A method according to claim 2, wherein the recombinant microorganism comprises a nucleotide sequence encoding a polypeptide capable of catalyzing the addition of a glucose at C-13 position of steviol or steviolmonoside,
whereby expression of the nucleotide sequence confers on the microorganism the ability to produce at least steviolbioside.

5. A method according to claim 2, wherein the recombinant microorganism comprises a nucleotide sequence encoding a polypeptide capable of catalyzing the addition of a C-19-glucose to steviolbioside,
whereby expression of the nucleotide sequence confers on the microorganism the ability to produce at least stevioside.

6. A method according to claim 2, wherein the recombinant microorganism comprises a nucleotide sequence encoding a polypeptide capable of catalyzing glucosylation of the C-3′ of the glucose at the C-13 position of stevioside,
whereby expression of the nucleotide sequence confers on the microorganism the ability to produce at least rebaudioside A.

7. A method according to claim 2, wherein the recombinant microorganism comprises a nucleotide sequence encoding a polypeptide capable of catalyzing the glucosylation of stevioside or rebaudioside A,
whereby expression of the nucleotide sequence confers on the microorganism the ability to produce at least rebaudioside D.

8. A method according to claim 2, wherein the recombinant microorganism comprises a nucleotide sequence encoding a polypeptide capable of catalyzing the glucosylation of stevioside,
whereby expression of the nucleotide sequence confers on the microorganism the ability to produce at least rebaudioside E.

9. A method according to claim 2, wherein the recombinant microorganism comprises a nucleotide sequence encoding a polypeptide capable of catalyzing the glucosylation of rebaudioside E,
whereby expression of the nucleotide sequence confers on the microorganism the ability to produce at least rebaudioside D.

10. A method according to claim 1, wherein the recombinant microorganism is capable of expressing a nucleotide sequence encoding a polypeptide having NADPH-cytochrome p450 reductase activity.

11. A method according to claim 1, wherein the recombinant microorganism is capable of expressing one or more of:
a. a nucleotide sequence encoding a polypeptide having ent-copalyl pyrophosphate synthase activity, wherein said nucleotide sequence comprises:
i. a nucleotide sequence encoding a polypeptide having ent-copalyl pyrophosphate synthase activity, said polypeptide comprising an amino acid sequence that has at least about 20% sequence identity with the amino acid sequence of SEQ ID NOs: 2, 4, 6, 8, 18, 20, 60 or 62;
ii. a nucleotide sequence that has at least about 15% sequence identity with the nucleotide sequence of SEQ ID NOs: 141, 142, 151, 152, 153, 154, 159, 160, 182 or 184;
iii. a nucleotide sequence the complementary strand of which hybridizes to a nucleic acid molecule of sequence of (i) or (ii); or
iv. a nucleotide sequence which differs from the sequence of a nucleic acid molecule of (i), (ii) or (iii) due to the degeneracy of the genetic code,
b. a nucleotide sequence encoding a polypeptide having ent-Kaurene synthase activity, wherein said nucleotide sequence comprises:
i. a nucleotide sequence encoding a polypeptide having ent-Kaurene synthase activity, said polypeptide comprising an amino acid sequence that has at least about 20% sequence identity with the amino acid sequence of SEQ ID NOs: 10, 12, 14, 16, 18, 20, 64 or 66;
ii. a nucleotide sequence that has at least about 15% sequence identity with the nucleotide sequence of SEQ ID NOs: 143, 144, 155, 156, 157, 158, 159, 160, 183 or 184;
iii. a nucleotide sequence the complementary strand of which hybridizes to a nucleic acid molecule of sequence of (i) or (ii); or
iv. a nucleotide sequence which differs from the sequence of a nucleic acid molecule of (i), (ii) or (iii) due to the degeneracy of the genetic code,
c. a nucleotide sequence encoding a polypeptide having ent-Kaurene oxidase activity, wherein said nucleotide sequence comprises:
i. a nucleotide sequence encoding a polypeptide having ent-Kaurene oxidase activity, said polypeptide comprising an amino acid sequence that has at least about 20% sequence identity with the amino acid sequence of SEQ ID NOs: 22, 24, 26, 68 or 86;
ii. a nucleotide sequence that has at least about 15% sequence identity with the nucleotide sequence of SEQ ID NOs: 145, 161, 162, 163, 180 or 186;
iii. a nucleotide sequence the complementary strand of which hybridizes to a nucleic acid molecule of sequence of (i) or (ii); or
iv. a nucleotide sequence which differs from the sequence of a nucleic acid molecule of (i), (ii) or (iii) due to the degeneracy of the genetic code; or
d. a nucleotide sequence encoding a polypeptide having kaurenoic acid 13-hydroxylase activity, wherein said nucleotide sequence comprises:
i. a nucleotide sequence encoding a polypeptide having kaurenoic acid 13-hydroxylase activity, said polypeptide comprising an amino acid sequence that has at least about 20% sequence identity with the amino acid sequence of SEQ ID NOs: 28, 30, 32, 34, 70, 90, 92, 94, 96 or 98;
ii. a nucleotide sequence that has at least about 15% sequence identity with the nucleotide sequence of SEQ ID NOs: 146, 164, 165, 166, 167 or 185;
iii. a nucleotide sequence the complementary strand of which hybridizes to a nucleic acid molecule of sequence of (i) or (ii); or
iv. a nucleotide sequence which differs from the sequence of a nucleic acid molecule of (i), (ii) or (iii) due to the degeneracy of the genetic code.

12. A method according to claim 2, wherein the recombinant microorganism is capable of expressing a nucleotide sequence encoding a polypeptide capable of catalyzing the addition of a glucose at the C-13 position of steviol, wherein said nucleotide comprises:
i. a nucleotide sequence encoding a polypeptide capable of catalyzing the addition of a glucose at the C-13 position of steviol, said polypeptide comprising an amino acid sequence that has at least about 20% sequence identity with the amino acid sequence of SEQ ID NOs: 36, 38 or 72;
ii. a nucleotide sequence that has at least about 15% sequence identity with the nucleotide sequence of SEQ ID NOs: 147, 168, 169 or 189;
iii. a nucleotide sequence the complementary strand of which hybridizes to a nucleic acid molecule of sequence of (i) or (ii); or
iv. a nucleotide sequence which differs from the sequence of a nucleic acid molecule of (i), (ii) or (iii) due to the degeneracy of the genetic code.

13. A method according to claim 2, wherein the recombinant microorganism is capable of expressing a nucleotide sequence encoding a polypeptide capable of catalyzing the addition of a glucose at the C-13 position of steviolmonoside, wherein said nucleotide comprises:
i. a nucleotide sequence encoding a polypeptide capable of catalyzing the addition of a glucose at the C-13 position of steviolmonoside, said polypeptide comprising an amino acid sequence that has at least about 20% sequence identity with the amino acid sequence of SEQ ID NOs: 88, 100, 102, 104, 106, 108, 110, 112;
ii. a nucleotide sequence that has at least about 15% sequence identity with the nucleotide sequence of SEQ ID NOs: 181 or 192;
iii. a nucleotide sequence the complementary strand of which hybridizes to a nucleic acid molecule of sequence of (i) or (ii); or
iv. a nucleotide sequence which differs from the sequence of a nucleic acid molecule of (i), (ii) or (iii) due to the degeneracy of the genetic code.

14. A method according to claim 2, wherein the recombinant microorganism is capable of expressing a nucleotide sequence encoding a polypeptide capable of catalyzing the addition of a glucose at the C-19 position of steviolbioside, wherein said nucleotide sequence comprises:
i. a nucleotide sequence encoding a polypeptide capable of catalyzing the addition of a glucose at the C-19 position of steviolbioside, said polypeptide comprising an amino acid sequence that has at least about 20% sequence identity with the amino acid sequence of SEQ ID NOs: 40, 42, 44, 46, 48 or 74;
ii. a nucleotide sequence that has at least about 15% sequence identity with the nucleotide sequence of SEQ ID NOs: 148, 170, 171, 172, 173, 174 or 190;
iii. a nucleotide sequence the complementary strand of which hybridizes to a nucleic acid molecule of sequence of (i) or (ii); or
iv. a nucleotide sequence which differs from the sequence of a nucleic acid molecule of (i), (ii) or (iii) due to the degeneracy of the genetic code.

15. A method according to claim 2, wherein the recombinant microorganism expresses a nucleotide sequence encoding a polypeptide capable of catalyzing glucosylation of the C-3′ of the glucose at the C-13 position of stevioside, wherein said nucleotide sequence comprises:
i. a nucleotide sequence encoding a polypeptide capable of catalyzing glucosylation of the C-3′ of the glucose at the C-13 position of stevioside, said polypeptide comprising an amino acid sequence that has at least about 20% sequence identity with the amino acid sequence of SEQ ID NOs: 50, 52 or 76;
ii. a nucleotide sequence that has at least about 15% sequence identity with the nucleotide sequence of SEQ ID NOs: 149, 175, 176 or 191;
iii. a nucleotide sequence the complementary strand of which hybridizes to a nucleic acid molecule of sequence of (i) or (ii); or
iv. a nucleotide sequence which differs from the sequence of a nucleic acid molecule of (i), (ii) or (iii) due to the degeneracy of the genetic code.

16. A method according to claim 2, wherein the recombinant microorganism expresses a nucleotide sequence encoding a polypeptide capable of catalysing one or more of: the glucosylation of stevioside or rebaudioside A to rebaudioside D; the glucosylation of stevioside to rebaudioside E; or the glucosylation of rebaudioside E to rebaudioside D, wherein said nucleotide sequence comprises:
i. a nucleotide sequence encoding a polypeptide capable of catalysing one or more of: the glucosylation of stevioside or rebaudioside A to rebaudioside D; the glucosylation of stevioside to rebaudioside E; or the glucosylation of rebaudioside E to rebaudioside D, said polypeptide comprising an amino acid sequence that has at least about 20% sequence identity with the amino acid sequence of SEQ ID NOs: 88, 100, 102, 104, 106, 108, 110, 112;
ii. a nucleotide sequence that has at least about 15% sequence identity with the nucleotide sequence of SEQ ID NOs: 181 or 192;
iii. a nucleotide sequence the complementary strand of which hybridizes to a nucleic acid molecule of sequence of (i) or (ii); or
iv. a nucleotide sequence which differs from the sequence of a nucleic acid molecule of (i), (ii) or (iii) due to the degeneracy of the genetic code.

17. A method according to claim 1, wherein the ability of the recombinant microorganism to produce geranylgeranyl diphosphate (GGPP) is upregulated.

18. A method according to claim 17, wherein the recombinant microorganism comprises one or more nucleotide sequence(s) encoding hydroxymethylglutaryl-CoA reductase, farnesyl-pyrophosphate synthetase and geranylgeranyl diphosphate synthase, whereby expression of the nucleotide sequence(s) confer(s) on the microorganism the ability to produce elevated levels of GGPP.

19. A method according to claim 17, wherein the recombinant microorganism is capable of expressing one or more of:
a. a nucleotide sequence encoding a polypeptide having hydroxymethylglutaryl-CoA reductase activity, wherein said nucleotide sequence comprises:
i. a nucleotide sequence encoding a polypeptide having hydroxymethylglutaryl-CoA reductase activity, said polypeptide comprising an amino acid sequence that has at least about 20% sequence identity with the amino acid sequence of SEQ ID NO: 80;
ii. a nucleotide sequence that has at least about 15% sequence identity with the nucleotide sequence of SEQ ID NO: 79;
iii. a nucleotide sequence the complementary strand of which hybridizes to a nucleic acid molecule of sequence of (i) or (ii); or
iv. a nucleotide sequence which differs from the sequence of a nucleic acid molecule of (i), (ii) or (iii) due to the degeneracy of the genetic code,
b. a nucleotide sequence encoding a polypeptide having farnesyl-pyrophosphate synthetase activity, wherein said nucleotide sequence comprises:
i. a nucleotide sequence encoding a polypeptide having farnesyl-pyrophosphate synthetase activity, said polypeptide comprising an amino acid sequence that has at least about 20% sequence identity with the amino acid sequence of SEQ ID NO: 82;
ii. a nucleotide sequence that has at least about 15% sequence identity with the nucleotide sequence of SEQ ID NOs: 81;
iii. a nucleotide sequence the complementary strand of which hybridizes to a nucleic acid molecule of sequence of (i) or (ii); or
iv. a nucleotide sequence which differs from the sequence of a nucleic acid molecule of (iii) due to the degeneracy of the genetic code; or
c. a nucleotide sequence encoding a polypeptide having geranylgeranyl diphosphate synthase activity, wherein said nucleotide sequence comprises:
i. a nucleotide sequence encoding a polypeptide having geranylgeranyl diphosphate synthase activity, said polypeptide comprising an amino acid sequence that has at least about 20% sequence identity with the amino acid sequence of SEQ ID NO: 84;
ii. a nucleotide sequence that has at least about 15% sequence identity with the nucleotide sequence of SEQ ID NOs: 83;
iii. a nucleotide sequence the complementary strand of which hybridizes to a nucleic acid molecule of sequence of (i) or (ii); or
iv. a nucleotide sequence which differs from the sequence of a nucleic acid molecule of (i), (ii) or (iii) due to the degeneracy of the genetic code.

20. A method according to claim 1, wherein the microorganism belongs to one of the genera Saccharomyces, Aspergillus, Pichia, Kluyveromyces, Candida, Hansenula, Humicola, Trichosporon, Brettanomyces, Pachysolen, Yarrowia, Yamadazyma or Escherichia.

21. A method according to claim 20, wherein the microorganism is a Saccharomyces cerevisiae cell, optionally wherein the glycosylated diterpene is rubusoside, a Yarrowia lipolitica cell, optionally wherein the glycosylated diterpene is rebaudioside A, or an Escherichia coli cell.

22. A method according to claim 1, wherein at least about 30% of one or more diterpenes or glycosylated diterpenes is produced extracellularly.

23. A method according to claim 1, wherein at least about 50% of one or more diterpenes or glycosylated diterpenes is produced extracellularly.

24. A method according to claim 1, wherein at least about 70% of one or more diterpenes or glycosylated diterpenes is produced extracellularly.

25. A method according to claim 1, wherein the recombinant microorganism is fermented at a temperature of about 29° C. or less.

26. A method according to claim 1, wherein the process is carried out on an industrial scale.

27. A fermentation broth comprising a diterpene or glycosylated diterpene obtainable by the method according to claim 1.

28. A fermentation broth according to claim 27 which comprises rebaudioside A or rebaudioside D.

29. A diterpene or glycosylated diterpene obtained by a method according to claim 1.

30. A diterpene or glycosylated diterpene according to claim 29 which is rebaudioside A or rebaudioside D.

31. A foodstuff, feed or beverage which comprises a diterpene or glycosylated diterpene according to claim 29.

32. A recombinant microorganism as defined in claim 1 capable of being used in extracellular production of a diterpene or glycosylated diterpene.

The application's sequence listing, which the Patent Office published only in electronic form, follows.

SEQUENCE LISTING (225 sequences)

SEQ ID NO: 1 - DNA, 2397 bp, Lactuca sativa
  CDS (1)..(2397)
atgaaaaccatgatttcttctccaatcccagctttccacccaagattttctccagctgctggttccagaagattatctccaatcttgccatcttccggttctgttgtcttgactggttccaagactcaatgtaaggccgtttctaaatctccaactcaagaatactttgatgttttgcaaaagaacggtttgccattcatcaactggcaaaacgatgtcgttgaagatgaattggacaaggaaaagaagatcttgtacccaaacgacgaaatcaagggtttcgttgaaagaatcaaagttatgttaggttccatggacgaaggtgaaatcactgtctctgcttatgacaccgcttgggttgctttggtccaagatatcgatggtaacggtagaccagaatttccttcttctctagaatggatcgtcaagaaccaattatccgatggttcctggggtgaccatttgatcttctctgctcacgacagaatcattaacactttggcttgtgtcattgctttgacttcctggaacgttcatccaggtaagtgtcaaaagggtttaaagttcttgaacgacaacatctccaagttggaagaagaaaacccagaacacatgccaatcggttttgaagttgctttcccatctttgattgatattgccagaaagttggatatccaagttccagaagattccccagctttgaaggaaatttacgccagaagaaacttgaaattgaccaagattccaaagtctttgatgcacaaggttccaactactttgttgcattctttggaaggtatgccagacttggaatgggaaaagttgttgaagctacaatgtaaggatggttctttcttgttctctccatcttccactgctttcgctttgatgcaaaccaaggaccaaaagtgtttgcaatacttgactgacgctgtcaccaagttcaacggtggtgttccaaacgtctacccagtcgacttgttcgaacacatctgggttgttgacagattgcaaagattaggtatctccagatacttcgactctgaaatcaaagactgtgtcgactacatctacagatactggaccaaggatggtatctgttgggctaagaactccaacgttcaagatattgatgacaccgctatgggtttcagagttttgagaatgcacggttacaaggtcactactgatgttttccgtcaattcgaaaaggacggtaaattcgtttgtttcccaggtcaaaccacccaagctgtcaccggtatgttcaacttgtttagagcttctcaagtcttgttcccagacgaaaagattttggaagatgctaagaaattctcttacaactacttgaaggaaaagcaatccaccaacgaattattggacaaatggatcattgccaaggacttgccaggtgaagttgaatacgctttagatgttccatggtacgcttccttgccacgtttggaaaccagattctacttggaacaatacggtggtgaagatgacgtctggatcggtaagactttgtacagaatgggtaatgtctccaacaacacctacttggaaatggccaaattggactacaacaactgtttggccattcatcacttggaatggaacaccatgcaacaatggtacgttgacttcggtatggaaagattcggtacttctgatatcacttctctattagtctcttactacttggctgctgcctccgtctttgaacctgaacgttctaaggaaagaattgcttgggctaagaccaccactttggttgacaccatctcttctttcttccactccttgaagatctctaacgaacaccgtcgtgaattcgttgaagaattcagaaacatctccaactccatccaccacgctaagtacggtaagccatggcacggtttgatggttgctttgaaaggtactttacacgaaattgccttggatgtcttgatgactcacagaagagacattcaccctcaattgcaccatgcttgggaaatgtggttgatgagatggcaacaaggtgtcgatgccactgaaggtcaagctgaattaattgttcaaaccatcaacatgactgctggtagatgggtttccaatgaattattggctcacccacaatacagattattgtcctctgtcatcaacaatatctgtcacgaaatctaccacaacagaacctgtatggaagtcaactctaccaccatttccacttctattgactccaagatgcaagaattggttcaattagtcttgtctgactctttggacgacttggaccaagatttgaagcaaaccttcttgactgttgccaagactttctactacaaggcttactgtgacccagaaaccatcaacgttcacatttctaaggtcatgttcgaaaccattatt

SEQ ID NO: 2 - protein, 799 aa, Lactuca sativa
MKTMISSPIPAFHPRFSPAAGSRRLSPILPSSGSVVLTGSKTQCKAVSKSPTQEYFDVLQKNGLPFINWQNDVVEDELDKEKKILYPNDEIKGFVERIKVMLGSMDEGEITVSAYDTAWVALVQDIDGNGRPEFPSSLEWIVKNQLSDGSWGDHLIFSAHDRIINTLACVIALTSWNVHPGKCQKGLKFLNDNISKLEEENPEHMPIGFEVAFPSLIDIARKLDIQVPEDSPALKEIYARRNLKLTKIPKSLMHKVPTTLLHSLEGMPDLEWEKLLKLQCKDGSFLFSPSSTAFALMQTKDQKCLQYLTDAVTKFNGGVPNVYPVDLFEHIWVVDRLQRLGISRYFDSEIKDCVDYIYRYWTKDGICWAKNSNVQDIDDTAMGFRVLRMHGYKVTTDVFRQFEKDGKFVCFPGQTTQAVTGMFNLFRASQVLFPDEKILEDAKKFSYNYLKEKQSTNELLDKWIIAKDLPGEVEYALDVPWYASLPRLETRFYLEQYGGEDDVWIGKTLYRMGNVSNNTYLEMAKLDYNNCLAIHHLEWNTMQQWYVDFGMERFGTSDITSLLVSYYLAAASVFEPERSKERIAWAKTTTLVDTISSFFHSLKISNEHRREFVEEFRNISNSIHHAKYGKPWHGLMVALKGTLHEIALDVLMTHRRDIHPQLHHAWEMWLMRWQQGVDATEGQAELIVQTINMTAGRWVSNELLAHPQYRLLSSVINNICHEIYHNRTCMEVNSTTISTSIDSKMQELVQLVLSDSLDDLDQDLKQTFLTVAKTFYYKAYCDPETINVHISKVMFETII

SEQ ID NO: 3 - DNA, 2271 bp, Lactuca sativa
  CDS (1)..(2271)
atgtgtaaggccgtttctaaatctccaactcaagaatactttgatgttttgcaaaagaacggtttgccattcatcaactggcaaaacgatgtcgttgaagatgaattggacaaggaaaagaagatcttgtacccaaacgacgaaatcaagggtttcgttgaaagaatcaaagttatgttaggttccatggacgaaggtgaaatcactgtctctgcttatgacaccgcttgggttgctttggtccaagatatcgatggtaacggtagaccagaatttccttcttctctagaatggatcgtcaagaaccaattatccgatggttcctggggtgaccatttgatcttctctgctcacgacagaatcattaacactttggcttgtgtcattgctttgacttcctggaacgttcatccaggtaagtgtcaaaagggtttaaagttcttgaacgacaacatctccaagttggaagaagaaaacccagaacacatgccaatcggttttgaagttgctttcccatctttgattgatattgccagaaagttggatatccaagttccagaagattccccagctttgaaggaaatttacgccagaagaaacttgaaattgaccaagattccaaagtctttgatgcacaaggttccaactactttgttgcattctttggaaggtatgccagacttggaatgggaaaagttgttgaagctacaatgtaaggatggttctttcttgttctctccatcttccactgctttcgctttgatgcaaaccaaggaccaaaagtgtttgcaatacttgactgacgctgtcaccaagttcaacggtggtgttccaaacgtctacccagtcgacttgttcgaacacatctgggttgttgacagattgcaaagattaggtatctccagatacttcgactctgaaatcaaagactgtgtcgactacatctacagatactggaccaaggatggtatctgttgggctaagaactccaacgttcaagatattgatgacaccgctatgggtttcagagttttgagaatgcacggttacaaggtcactactgatgttttccgtcaattcgaaaaggacggtaaattcgtttgtttcccaggtcaaaccacccaagctgtcaccggtatgttcaacttgtttagagcttctcaagtcttgttcccagacgaaaagattttggaagatgctaagaaattctcttacaactacttgaaggaaaagcaatccaccaacgaattattggacaaatggatcattgccaaggacttgccaggtgaagttgaatacgctttagatgttccatggtacgcttccttgccacgtttggaaaccagattctacttggaacaatacggtggtgaagatgacgtctggatcggtaagactttgtacagaatgggtaatgtctccaacaacacctacttggaaatggccaaattggactacaacaactgtttggccattcatcacttggaatggaacaccatgcaacaatggtacgttgacttcggtatggaaagattcggtacttctgatatcacttctctattagtctcttactacttggctgctgcctccgtctttgaacctgaacgttctaaggaaagaattgcttgggctaagaccaccactttggttgacaccatctcttctttcttccactccttgaagatctctaacgaacaccgtcgtgaattcgttgaagaattcagaaacatctccaactccatccaccacgctaagtacggtaagccatggcacggtttgatggttgctttgaaaggtactttacacgaaattgccttggatgtcttgatgactcacagaagagacattcaccctcaattgcaccatgcttgggaaatgtggttgatgagatggcaacaaggtgtcgatgccactgaaggtcaagctgaattaattgttcaaaccatcaacatgactgctggtagatgggtttccaatgaattattggctcacccacaatacagattattgtcctctgtcatcaacaatatctgtcacgaaatctaccacaacagaacctgtatggaagtcaactctaccaccatttccacttctattgactccaagatgcaagaattggttcaattagtcttgtctgactctttggacgacttggaccaagatttgaagcaaaccttcttgactgttgccaagactttctactacaaggcttactgtgacccagaaaccatcaacgttcacatttctaaggtcatgttcgaaaccattatt

SEQ ID NO: 4 - protein, 757 aa, Lactuca sativa
MCKAVSKSPTQEYFDVLQKNGLPFINWQNDVVEDELDKEKKILYPNDEIKGFVERIKVMLGSMDEGEITVSAYDTAWVALVQDIDGNGRPEFPSSLEWIVKNQLSDGSWGDHLIFSAHDRIINTLACVIALTSWNVHPGKCQKGLKFLNDNISKLEEENPEHMPIGFEVAFPSLIDIARKLDIQVPEDSPALKEIYARRNLKLTKIPKSLMHKVPTTLLHSLEGMPDLEWEKLLKLQCKDGSFLFSPSSTAFALMQTKDQKCLQYLTDAVTKFNGGVPNVYPVDLFEHIWVVDRLQRLGISRYFDSEIKDCVDYIYRYWTKDGICWAKNSNVQDIDDTAMGFRVLRMHGYKVTTDVFRQFEKDGKFVCFPGQTTQAVTGMFNLFRASQVLFPDEKILEDAKKFSYNYLKEKQSTNELLDKWIIAKDLPGEVEYALDVPWYASLPRLETRFYLEQYGGEDDVWIGKTLYRMGNVSNNTYLEMAKLDYNNCLAIHHLEWNTMQQWYVDFGMERFGTSDITSLLVSYYLAAASVFEPERSKERIAWAKTTTLVDTISSFFHSLKISNEHRREFVEEFRNISNSIHHAKYGKPWHGLMVALKGTLHEIALDVLMTHRRDIHPQLHHAWEMWLMRWQQGVDATEGQAELIVQTINMTAGRWVSNELLAHPQYRLLSSVINNICHEIYHNRTCMEVNSTTISTSIDSKMQELVQLVLSDSLDDLDQDLKQTFLTVAKTFYYKAYCDPETINVHISKVMFETII

SEQ ID NO: 5 - DNA, 2283 bp, Picea glauca
  CDS (1)..(2283)
atgaagatgtccaagtctgttgaagtccaacactgtgctgtccaattcttgtcttccaccaccgatcaaatcgaaatcagagaaagaaacttgcaaatctccactgaagccatgaagatgaaatcctggattgaaaccgtcaaatacattttgcaatccatggaagatggtgaaatcaccatctccgcttacgacactgcttggatcgccttggttccagctttgaacggttcctctgaacctcaattcccatcctctttacaatggttgatcaacaaccaattgcaagacggttcctggggtgacccattgatgttcttgattagagatcgtatcatcaacactttggcttgtgttttggctttgaagacctggaacattcactctttgggtgttaacaagggtctatctttcttgcaaacttacatccctaaaatgaacgatgaacatgatgctcacactccagttggtttcgaaattgtcttcccagctttgatggaagatgccaagatcatggaattggacttgccatacgacgctgaattcttgcaaaagatttacgatgaaagagatttgaagatgaagagaatcccaatgaaggttttgcacgaattcccatctactttattgcactccttggaaggtttgagagacaaggtcaactgggaagaattattgaagttgcaatccaagaacggttctttcttattctctccagcttctactgcttgtgctttggctcaaacttctgacaccaactgtttgagatacttgaatgaaatcaccaagaaatacgacggtggtgctccaaatgtttacccagtcgacttgttcgaaagattatggaccgtcgatcgtattgaaagattaggtattgctagatactttgaatctgaaatcactgactctttggaatacgtttacagatactggactaaccaaggtatcggttgggctagagattctccagttaaggacgtcgatgacacttccatggctttcagactattacgttcccacggtttcgacgttactgctgaagctttcaaccacttcaagcaagatgaccaattcttctgtttctttggtcaaaccaagcaaaccgtcactggtatgtacaacttgtacagagcttctcaattctccttcccaggtgaatctatcttagaagaagctcgtgtcttcaccaagaacttcttggaagaaaagagagctgaaaagcaattgagagacaaatggatcattgctaaaggtttgaaggaagaagtcgaatacgctttgaagttcccatggtatgcctcccaaccaagaattgacaccagaatgtacatcaaccaatacagagttgatgacgtctggatcggtaaggctctatacagaatgccaattgtcaacaacaagacctacatcgaattggccaaggctgacttcaacatttgtcaatctatccacagaactgaattgcacggtatcatcagatggtacagagaatccggtttggacgaattgggtttgagacaagaccaaatcgtcaaatcttacttcttggctgccattgctatctacgaaccagacatggcctctgccagattagcttgggctaagtctgctgtcttgatggctgctatcagaatcttcttttccggtgaaaactgttttgcccaccatagaagacaattcttggatgcctttaccagatgggacggtagagccatgagagattctccaaactccgctaagagattattctcttgtttattcagaatggttaacttgttctctgtcgacggtgttgttgctcaaggtagagacatctccggtgacttgagacacagatgggaacactggttggcctctgaagctgaagacttgaccgatgctcaagaccacgaaaagttgggtactgaagctgaaattgttgttttgactgctgctttcttgggtagagaaaccatttctccagatttgatttctcacccagatttctcttctattatgaaggttaccaacactgtttgttctttattgagaagaattgccacctacaaggaagaaggttgtgactccccatctggtactgaagaagatgacagattgaaacgtcgtgctgaagaaggtatgggtcatttggttcgtgccgtttacagacaccaatactctccagttccatctggtgtcaagagattgtgtttggttgttggtaagtccttttactacgctgctcactgtaacaatgaagaagttggtaaccatgtcgaaaccgtcttgttccaaccagtatac

SEQ ID NO: 6 - protein, 761 aa, Picea glauca
MKMSKSVEVQHCAVQFLSSTTDQIEIRERNLQISTEAMKMKSWIETVKYILQSMEDGEITISAYDTAWIALVPALNGSSEPQFPSSLQWLINNQLQDGSWGDPLMFLIRDRIINTLACVLALKTWNIHSLGVNKGLSFLQTYIPKMNDEHDAHTPVGFEIVFPALMEDAKIMELDLPYDAEFLQKIYDERDLKMKRIPMKVLHEFPSTLLHSLEGLRDKVNWEELLKLQSKNGSFLFSPASTACALAQTSDTNCLRYLNEITKKYDGGAPNVYPVDLFERLWTVDRIERLGIARYFESEITDSLEYVYRYWTNQGIGWARDSPVKDVDDTSMAFRLLRSHGFDVTAEAFNHFKQDDQFFCFFGQTKQTVTGMYNLYRASQFSFPGESILEEARVFTKNFLEEKRAEKQLRDKWIIAKGLKEEVEYALKFPWYASQPRIDTRMYINQYRVDDVWIGKALYRMPIVNNKTYIELAKADFNICQSIHRTELHGIIRWYRESGLDELGLRQDQIVKSYFLAAIAIYEPDMASARLAWAKSAVLMAAIRIFFSGENCFAHHRRQFLDAFTRWDGRAMRDSPNSAKRLFSCLFRMVNLFSVDGVVAQGRDISGDLRHRWEHWLASEAEDLTDAQDHEKLGTEAEIVVLTAAFLGRETISPDLISHPDFSSIMKVTNTVCSLLRRIATYKEEGCDSPSGTEEDDRLKRRAEEGMGHLVRAVYRHQYSPVPSGVKRLCLVVGKSFYYAAHCNNEEVGNHVETVLFQPVY

SEQ ID NO: 7 - DNA, 1548 bp, Bradyrhizobium japonicum
  CDS (1)..(1548)
atgaacgctttgtctgaacacatcttatctgaattgagaagattattgtccgaaatgtctgacggtggttccgtcggtccttccgtttacgacaccgcccaagccttgagattccacggtaacgtcactggtagacaagatgcttacgcttggttgattgctcaacaacaagctgacggtggttggggttctgctgatttcccattattcagacatgccccaacctgggctgctctattggctttgcaaagagctgacccattgccaggtgctgctgatgccgtccaaaccgccaccagattcttgcaaagacaaccagacccatacgctcatgccgttccagaagatgctccaatcggtgctgaattgatcttgcctcaattctgtggtgaagctgcttctctattaggtggtgttgccttcccaagacacccagctttgttgccattgagacaagcttgtttggtcaaattgggtgccgttgccatgttgccatctggtcacccattgttgcactcctgggaagcctggggtacttctccaactactgcttgtccagacgatgacggttccatcggtatctctccagctgctactgctgcttggagagcccaagccgttaccagaggttccactccacaagtcggtagagctgatgcttacttgcaaatggcttccagagccaccagatctggtattgaaggtgttttcccaaatgtctggccaatcaacgtctttgaaccatgttggtctttgtacactttgcacttggctggtttgtttgctcatccagctttggctgaagccgtcagagtcattgttgctcaattggatgctagattaggtgtccacggtttaggtccagctttgcacttcgctgctgacgctgatgacaccgccgttgctctatgtgttttgcacttggctggtcgtgacccagctgttgacgctttgagacacttcgaaattggtgaattgttcgtcactttcccaggtgaaagaaacgcttctgtttccaccaacatccacgctttgcacgctttgagattgttgggtaagccagctgctggtgcttctgcttacgttgaagccaacagaaacccacacggtttatgggacaacgaaaagtggcacgtttcctggttatacccaactgctcacgccgttgctgctttggcccaaggtaagcctcaatggagagatgaaagagctttggccgctttgttgcaagctcaaagagatgacggtggttggggtgctggtcgtggttctactttcgaagaaaccgcctacgctttgtttgctttgcatgtcatggacggttctgaagaagctaccggtagaagaagaattgctcaagttgttgccagagctttggaatggatgttggctcgtcacgctgcccacggtttgccacaaactccattatggatcggtaaggaattgtactgtccaaccagagttgtcagagttgctgaattggctggtttatggttggctttgagatggggtcgtcgtgtcttggctgaaggtgctggtgctgcaccc

SEQ ID NO: 8 - protein, 516 aa, Bradyrhizobium japonicum
MNALSEHILSELRRLLSEMSDGGSVGPSVYDTAQALRFHGNVTGRQDAYAWLIAQQQADGGWGSADFPLFRHAPTWAALLALQRADPLPGAADAVQTATRFLQRQPDPYAHAVPEDAPIGAELILPQFCGEAASLLGGVAFPRHPALLPLRQACLVKLGAVAMLPSGHPLLHSWEAWGTSPTTACPDDDGSIGISPAATAAWRAQAVTRGSTPQVGRADAYLQMASRATRSGIEGVFPNVWPINVFEPCWSLYTLHLAGLFAHPALAEAVRVIVAQLDARLGVHGLGPALHFAADADDTAVALCVLHLAGRDPAVDALRHFEIGELFVTFPGERNASVSTNIHALHALRLLGKPAAGASAYVEANRNPHGLWDNEKWHVSWLYPTAHAVAALAQGKPQWRDERALAALLQAQRDDGGWGAGRGSTFEETAYALFALHVMDGSEEATGRRRIAQVVARALEWMLARHAAHGLPQTPLWIGKELYCPTRVVRVAELAGLWLALRWGRRVLAEGAGAAP

SEQ ID NO: 9 - DNA, 2364 bp, Lactuca sativa
  CDS (1)..(2364)
atgaacattgctcaaatcacctcttctgctatgttggttccatcttctcacatcccacaccgttcctgggttgtcaactgttgtatggttcaatacaacccatccggtctaagaactgcttcctctcaagccggtcaagtcaacccaactgttatgactttggatgtcactaaggaaagaatcagaaagttgttcaacaacgtcgaagtttctgtttcctcttacgacaccgcttgggttgccatggttccatctccaaactctccaaagtccccatgtttcccagactgtttgaactggttgttggacaaccaattggatgatggttcctggggtttgttgccacaccaatctccattgatcaaagacactttatcttctactttggcttgtgttttggctttaaagagatggaacgtcggtaaggatcaaatcaacaagggtttacattacatcgaatccaactttgcttccgtcactgataagaaccaagcctctccattcggttttgacatcattttcccaggtatgttggaatacgccaaggatttggacattaaattgcctttgaaccaaactcacttgtccgtcatgttgcacgaaagagaattggaattgagaagatgtcactctaacggtcgtgaagcctacttagcttacatttccgaaggtttgggtaacttgaacgactggaacatggttatgaagtaccaaatgaagaacggttctttgttcaactctccttctgctactgcttctgttttgattcaccaccaaaatgctggttgtttgcactacttaacctccctattggacaagtttggtaatgctgtcccaactgtttacccaatcgacttgtacgttagattgtccatggttgacactttggaaagattgggtatcaagagacatttcatggttgaaattcaaaatgtcttggacgaaacctacagatgttgggttcaaggtgatgttcaaatcttcatggatgtcgttacctgtgctttggctttcagagttctacgttctaacggttacgaagtctcttctgacccattggctaagattaccaaagaaggtgactacatgaactctccagaaaagcctttcaaggacgtctacacctctttggaagtctacaaggcttctcaaatcatctaccaagaagaattggccttcagagaacaaaacttgacctcttatttgccatcttctaacaaattgtccaactacattttgaaggaagttgatgacgctttgaagttcccattcaatggttctctagaaagaatgtccactagaagaaacattgaacactacaacttgaaccacaccagaattttgaagaccacctactcctcttccaacatttccaacaaggactacttgaaattagccgtccaagacttcaacgaatgtcaatccatctactgtgaagaattaaaggacttggaaagatgggttgtcgaaaacagattagacaagttgaaatttgctcgtcaaaagaccgcttactgttacttctctgctgcttctttcttatcttctccagatttgtccgatgctagaatctcctgggctaaatcttccattttgactaccgtcattgatgatttctttgacgtcggtggttccatggatgaattggttaacttcgtccacatcatcgaaaagtggaacgtcaacgttgaaaacgattgttgttctgaagaagtcggtgttttgttcttggctttaaaggatgctgtctgttggattggtgacaaggctttcaagatccaagaaagaaacatcacttcccacgtcattgaaatctggttggacttggttaagtccatgttgagagaagctatttgggctaaggacggttccatcccaaccatcaacgaatacatggaaaacggttacgtttctttcgccttgggtccaatcgttttgccaactttgtacttcttaggtgtcaagttgtctgaagaagtcgtccaatcttccgaataccacaagttgtacgaagttatgtccacccaaggtagattgatgaacgacattcactctttcaaacgtgaaaagaaggccggtaagttgaatgctgttgctttatacatgtccgacggtaaatctggttctgttgaagaagaagttgtcgaagaaatgaagatcttgactaaatctcaaagaaaggaaatgatgaagttggttttggaaaccaagggttccgttgtcccaagagtttgtaaggacgttttctggaacatgtgtaacgtcttgaacttgttctacgctaccgatgacggtttcactggtaacgccatcttagatgttgtcaaggaaatcatctacgaaccagtctctcatgaattgata

SEQ ID NO: 10 - protein, 788 aa, Lactuca sativa
MNIAQITSSAMLVPSSHIPHRSWVVNCCMVQYNPSGLRTASSQAGQVNPTVMTLDVTKERIRKLFNNVEVSVSSYDTAWVAMVPSPNSPKSPCFPDCLNWLLDNQLDDGSWGLLPHQSPLIKDTLSSTLACVLALKRWNVGKDQINKGLHYIESNFASVTDKNQASPFGFDIIFPGMLEYAKDLDIKLPLNQTHLSVMLHERELELRRCHSNGREAYLAYISEGLGNLNDWNMVMKYQMKNGSLFNSPSATASVLIHHQNAGCLHYLTSLLDKFGNAVPTVYPIDLYVRLSMVDTLERLGIKRHFMVEIQNVLDETYRCWVQGDVQIFMDVVTCALAFRVLRSNGYEVSSDPLAKITKEGDYMNSPEKPFKDVYTSLEVYKASQIIYQEELAFREQNLTSYLPSSNKLSNYILKEVDDALKFPFNGSLERMSTRRNIEHYNLNHTRILKTTYSSSNISNKDYLKLAVQDFNECQSIYCEELKDLERWVVENRLDKLKFARQKTAYCYFSAASFLSSPDLSDARISWAKSSILTTVIDDFFDVGGSMDELVNFVHIIEKWNVNVENDCCSEEVGVLFLALKDAVCWIGDKAFKIQERNITSHVIEIWLDLVKSMLREAIWAKDGSIPTINEYMENGYVSFALGPIVLPTLYFLGVKLSEEVVQSSEYHKLYEVMSTQGRLMNDIHSFKREKKAGKLNAVALYMSDGKSGSVEEEVVEEMKILTKSQRKEMMKLVLETKGSVVPRVCKDVFWNMCNVLNLFYATDDGFTGNAILDVVKEIIYEPVSHELI

SEQ ID NO: 11 - DNA, 2250 bp, Lactuca sativa
  CDS (1)..(2250)
atggcttcctctcaagccggtcaagtcaacccaactgttatgactttggatgtcactaaggaaagaatcagaaagttgttcaacaacgtcgaagtttctgtttcctcttacgacaccgcttgggttgccatggttccatctccaaactctccaaagtccccatgtttcccagactgtttgaactggttgttggacaaccaattggatgatggttcctggggtttgttgccacaccaatctccattgatcaaagacactttatcttctactttggcttgtgttttggctttaaagagatggaacgtcggtaaggatcaaatcaacaagggtttacattacatcgaatccaactttgcttccgtcactgataagaaccaagcctctccattcggttttgacatcattttcccaggtatgttggaatacgccaaggatttggacattaaattgcctttgaaccaaactcacttgtccgtcatgttgcacgaaagagaattggaattgagaagatgtcactctaacggtcgtgaagcctacttagcttacatttccgaaggtttgggtaacttgaacgactggaacatggttatgaagtaccaaatgaagaacggttctttgttcaactctccttctgctactgcttctgttttgattcaccaccaaaatgctggttgtttgcactacttaacctccctattggacaagtttggtaatgctgtcccaactgtttacccaatcgacttgtacgttagattgtccatggttgacactttggaaagattgggtatcaagagacatttcatggttgaaattcaaaatgtcttggacgaaacctacagatgttgggttcaaggtgatgttcaaatcttcatggatgtcgttacctgtgctttggctttcagagttctacgttctaacggttacgaagtctcttctgacccattggctaagattaccaaagaaggtgactacatgaactctccagaaaagcctttcaaggacgtctacacctctttggaagtctacaaggcttctcaaatcatctaccaagaagaattggccttcagagaacaaaacttgacctcttatttgccatcttctaacaaattgtccaactacattttgaaggaagttgatgacgctttgaagttcccattcaatggttctctagaaagaatgtccactagaagaaacattgaacactacaacttgaaccacaccagaattttgaagaccacctactcctcttccaacatttccaacaaggactacttgaaattagccgtccaagacttcaacgaatgtcaatccatctactgtgaagaattaaaggacttggaaagatgggttgtcgaaaacagattagacaagttgaaatttgctcgtcaaaagaccgcttactgttacttctctgctgcttctttcttatcttctccagatttgtccgatgctagaatctcctgggctaaatcttccattttgactaccgtcattgatgatttctttgacgtcggtggttccatggatgaattggttaacttcgtccacatcatcgaaaagtggaacgtcaacgttgaaaacgattgttgttctgaagaagtcggtgttttgttcttggctttaaaggatgctgtctgttggattggtgacaaggctttcaagatccaagaaagaaacatcacttcccacgtcattgaaatctggttggacttggttaagtccatgttgagagaagctatttgggctaaggacggttccatcccaaccatcaacgaatacatggaaaacggttacgtttctttcgccttgggtccaatcgttttgccaactttgtacttcttaggtgtcaagttgtctgaagaagtcgtccaatcttccgaataccacaagttgtacgaagttatgtccacccaaggtagattgatgaacgacattcactctttcaaacgtgaaaagaaggccggtaagttgaatgctgttgctttatacatgtccgacggtaaatctggttctgttgaagaagaagttgtcgaagaaatgaagatcttgactaaatctcaaagaaaggaaatgatgaagttggttttggaaaccaagggttccgttgtcccaagagtttgtaaggacgttttctggaacatgtgtaacgtcttgaacttgttctacgctaccgatgacggtttcactggtaacgccatcttagatgttgtcaaggaaatcatctacgaaccagtctctcatgaattgata

SEQ ID NO: 12 - protein, 750 aa, Lactuca sativa
MASSQAGQVNPTVMTLDVTKERIRKLFNNVEVSVSSYDTAWVAMVPSPNSPKSPCFPDCLNWLLDNQLDDGSWGLLPHQSPLIKDTLSSTLACVLALKRWNVGKDQINKGLHYIESNFASVTDKNQASPFGFDIIFPGMLEYAKDLDIKLPLNQTHLSVMLHERELELRRCHSNGREAYLAYISEGLGNLNDWNMVMKYQMKNGSLFNSPSATASVLIHHQNAGCLHYLTSLLDKFGNAVPTVYPIDLYVRLSMVDTLERLGIKRHFMVEIQNVLDETYRCWVQGDVQIFMDVVTCALAFRVLRSNGYEVSSDPLAKITKEGDYMNSPEKPFKDVYTSLEVYKASQIIYQEELAFREQNLTSYLPSSNKLSNYILKEVDDALKFPFNGSLERMSTRRNIEHYNLNHTRILKTTYSSSNISNKDYLKLAVQDFNECQSIYCEELKDLERWVVENRLDKLKFARQKTAYCYFSAASFLSSPDLSDARISWAKSSILTTVIDDFFDVGGSMDELVNFVHIIEKWNVNVENDCCSEEVGVLFLALKDAVCWIGDKAFKIQERNITSHVIEIWLDLVKSMLREAIWAKDGSIPTINEYMENGYVSFALGPIVLPTLYFLGVKLSEEVVQSSEYHKLYEVMSTQGRLMNDIHSFKREKKAGKLNAVALYMSDGKSGSVEEEVVEEMKILTKSQRKEMMKLVLETKGSVVPRVCKDVFWNMCNVLNLFYATDDGFTGNAILDVVKEIIYEPVSHELI

SEQ ID NO: 13 - DNA, 2271 bp, Picea glauca
  CDS (1)..(2271)
atgaagagagaacaatacactatcttgaacgaaaaggaatccatggctgaagaattaatcttgagaatcaagagaatgttttctgaaatcgaaaacactcaaacctctgcttctgcttacgacaccgcttgggttgccatggttccatctttggactcctctcaacaaccacaattccctcaatgtttgtcctggatcattgacaaccaattgttggatggttcctggggtatcccatacttgatcatcaaggacagactatgtcacactttagcttgtgtcattgctttgagaaaatggaacgctggtaaccaaaatgtcgaaaccggtctacgtttcttgagagaaaacattgaaggtatcgttcacgaagatgaatacactccaattggtttccaaatcattttcccagctatgttggaagaagctcgtggtttaggtctagaattgccatacgacttgactccaatcaagttgatgttgacccacagagaaaagatcatgaagggtaaggccattgaccacatgcacgaatacgactcttctttgatctacactgttgaaggtatccacaagatcgttgactggaacaaggttttgaaacatcaaaacaaggatggttctttgttcaactctccatctgctactgcttgtgctttgatgcacactagaaagtccaactgtttggaatacttgtcctccatgttgcaaaagttaggtaacggtgttccatccgtctacccaatcaacttatatgctcgtatctccatgattgacagattacaaagattaggtttggctagacatttcagaaacgaaatcattcacgctttggacgacatctacagatactggatgcaaaaggaaacctccagagaaggtaagtctttgaccccagatattgtctctacttccatcgctttcatgttgttgagattgcacggttacgatgttccagctgatgttttctgttgttaccatttgcactccattgaacaatctggtgaagccgttactgctatgttgtctttgtacagagcctctcaaattatgttcccaggtgaaaccattttggaagaaatcaagaccgtttctagaaagtacttggacaagagaaaggaaaacggtcgtatctactaccacaacattgttatgaaggacttgagaggtgaagtcgaatacgccttgtctgttccatggtacgcttccttggaaagaattgaaaacagaagatacattgaccaatacggtgtcaacgatacctggatcgctaagacctcttacaaaatcccatgtatctccaatgacttattcttggctttggccaagcaagactacaacatctgtcaagccattcaacaaaaggaattgagagaattggaaagatggtttgctgataacaaattctctcacttgaacttcgctcgtcaaaagttgatctactgttacttctctgccgctgctactttgttctctccagaattgtctgctgccagagttgtctgggctaagaacggtgttatcaccaccgtcgttgatgacttcttcgatgtcggtggttcttctgaagaaattcactctttcgtcgaagctgttagagtctgggacgaagctgctaccgatggtttgtctgaaaacgttcaaatcttattctccgctttatacaacaccgtcgacgaaattgtccaacaagccttcgttttccaaggtagagacatctccattcacttgagagaaatctggtacagattggtcaactccatgatgactgaagctcaatgggctagaactcactgtattccatccatgcacgaatacatggaaaacgctgaaccttctattgctttggaaccaatcgtcttgtcctctttatactttgttggtccaaagttgtctgaagaaatcatttgtcacccagaatactacaacttgatgcatttgttgaatatctgtggtagattgttgaacgatatccaaggttgtaaacgtgaagcccaccaaggtaagttgaactccgtcactttgtacatggaagaaaactctggtactaccatggaagatgctatcgtttacttgagaaagaccatcgacgaatccagacaattgctattgaaagaagttttaagaccatctattgttccaagagaatgtaaacaattgcactggaacatgatgagaatcttgcaattgttctacttgaagaacgatggttttacctctccaactgaaatgttgggttacgtcaacgccgtcattgtcgacccaattttg

SEQ ID NO: 14 - protein, 757 aa, Picea glauca
MKREQYTILNEKESMAEELILRIKRMFSEIENTQTSASAYDTAWVAMVPSLDSSQQPQFPQCLSWIIDNQLLDGSWGIPYLIIKDRLCHTLACVIALRKWNAGNQNVETGLRFLRENIEGIVHEDEYTPIGFQIIFPAMLEEARGLGLELPYDLTPIKLMLTHREKIMKGKAIDHMHEYDSSLIYTVEGIHKIVDWNKVLKHQNKDGSLFNSPSATACALMHTRKSNCLEYLSSMLQKLGNGVPSVYPINLYARISMIDRLQRLGLARHFRNEIIHALDDIYRYWMQKETSREGKSLTPDIVSTSIAFMLLRLHGYDVPADVFCCYHLHSIEQSGEAVTAMLSLYRASQIMFPGETILEEIKTVSRKYLDKRKENGRIYYHNIVMKDLRGEVEYALSVPWYASLERIENRRYIDQYGVNDTWIAKTSYKIPCISNDLFLALAKQDYNICQAIQQKELRELERWFADNKFSHLNFARQKLIYCYFSAAATLFSPELSAARVVWAKNGVITTVVDDFFDVGGSSEEIHSFVEAVRVWDEAATDGLSENVQILFSALYNTVDEIVQQAFVFQGRDISIHLREIWYRLVNSMMTEAQWARTHCIPSMHEYMENAEPSIALEPIVLSSLYFVGPKLSEEIICHPEYYNLMHLLNICGRLLNDIQGCKREAHQGKLNSVTLYMEENSGTTMEDAIVYLRKTIDESRQLLLKEVLRPSIVPRECKQLHWNMMRILQLFYLKNDGFTSPTEMLGYVNAVIVDPIL

SEQ ID NO: 15 - DNA, 900 bp, Bradyrhizobium japonicum
  CDS (1)..(900)
atgatccaaactgaaagagctgtccaacaagttttggaatggggtcgttctttgaccggtttcgctgacgaacacgctgtcgaagctgttcgtggtggtcaatacatcttacaaagaatccacccatctttgagaggtacttctgccagaactggtagagatccacaagatgaaactttgattgtcaccttttacagagaattggctttgttgttctggttagatgactgtaacgatttgggtttgatttccccagaacaattggctgctgtcgaacaagctttgggtcaaggtgtcccatgtgctttgccaggtttcgaaggttgtgccgttttgagagcttctttggccactttggcctacgacagaagagactacgctcaattgttggatgacaccagatgttactccgctgctttgagagctggtcatgcccaagctgttgctgctgaaagatggtcctacgctgaatacttgcacaacggtattgactccattgcttacgctaacgttttctgttgtttgtccctattatggggtttggacatggctactttgagagccagaccagctttcagacaagtcttgagattaatctctgccattggtagattacaaaacgatttgcacggttgtgacaaggaccgttctgctggtgaagctgacaacgctgtcatcttattgttgcaaagatacccagccatgccagttgttgaattcttgaacgatgaattggctggtcacaccagaatgttgcaccgtgtcatggctgaagaaagattcccagctccatggggtccattaatcgaagctatggctgccatcagagttcaatactacagaacctccacctctcgttacagatctgacgctgttagaggtggtcaaagagcccctgcc

SEQ ID NO: 16 - protein, 300 aa, Bradyrhizobium japonicum
MIQTERAVQQVLEWGRSLTGFADEHAVEAVRGGQYILQRIHPSLRGTSARTGRDPQDETLIVTFYRELALLFWLDDCNDLGLISPEQLAAVEQALGQGVPCALPGFEGCAVLRASLATLAYDRRDYAQLLDDTRCYSAALRAGHAQAVAAERWSYAEYLHNGIDSIAYANVFCCLSLLWGLDMATLRARPAFRQVLRLISAIGRLQNDLHGCDKDRSAGEADNAVILLLQRYPAMPVVEFLNDELAGHTRMLHRVMAEERFPAPWGPLIEAMAAIRVQYYRTSTSRYRSDAVRGGQRAPA

SEQ ID NO: 17 - DNA, 2838 bp, Phaeosphaeria sp.
  CDS (1)..(2838)
atgtttgctaagtttgatatgttggaagaagaagctagagctttggtcagaaaggtcggtaacgctgttgacccaatctacggtttctctaccacttcctgtcaaatctacgacaccgcttgggctgctatgatctccaaggaagaacacggtgacaaggtctggttgttcccagaatctttcaaatacttgttggaaaagcaaggtgaagatggttcctgggaaagacatccaagatccaagactgtcggtgttttgaacactgctgccgcttgtttggccttgttgagacacgtcaagaaccctttgcaattgcaagacattgctgcccaagacatcgaattgagaatccaaagaggtttgcgttctttggaagaacaattgattgcttgggatgatgtcttggacaccaaccacatcggtgtcgaaatgattgttccagctttgttggactacttgcaagccgaagatgaaaacgttgactttgaattcgaatcccactctctattgatgcaaatgtacaaagaaaagatggccagattctccccagaatccttatacagagctagaccatcttctgccttacataatttggaagctttgatcggtaaattggactttgacaaggttggtcaccacttgtacaacggttccatgatggcttccccatcttccactgctgcctttctaatgcatgcctctccatggtcccacgaagctgaagcttacctacgtcacgttttcgaagctggtactggtaagggttccggtggtttcccaggtacttacccaaccacttacttcgaattgaactgggttttgtccactttgatgaaatctggtttcactttatctgatttggaatgtgatgaattatcttccattgccaacaccattgctgaaggtttcgaatgtgaccacggtgtcatcggttttgctccaagagctgtcgatgtcgacgacaccgctaagggtttgttgactttaactttattaggtatggatgaaggtgtttctccagctccaatgattgctatgttcgaagccaaggaccacttcttgactttcttgggtgaacgtgacccatctttcacttctaactgtcacgttttgttatctttgttgcacagaaccgatttgttgcaatatttgcctcaaatcagaaagaccaccaccttcttgtgtgaagcctggtgggcttgtgacggtcaaatcaaggacaaatggcacttatctcacttgtacccaaccatgttgatggtccaagctttcgctgaaatcttattgaagtctgctgaaggtgaaccattgcacgatgctttcgatgccgctactttgtccagagtctccatttgtgttttccaagcttgtttgagaactctattggcccaatctcaagatggttcttggcacggtcaaccagaagcttcttgttacgctgtcttgactttggctgaatctggtcgtttggttttgttgcaagctttgcaaccacaaatcgctgctgccatggaaaaggccgctgatgttatgcaagctggtagatggtcctgttctgatcatgactgtgactggacctccaagaccgcttacagagttgacttagttgctgctgcttacagattagctgctatgaaagcttcttccaacttgactttcaccgtcgatgacaacgtttccaagagatccaacggtttccaacaattggtcggtagaactgacttgttctctggtgtcccagcctgggaattacaagcttctttcttggaatctgctttgttcgttcctttgttgagaaaccatagattggatgttttcgacagagatgacatcaaggtttctaaggaccactacttggacatgatcccattcacctgggttggttgtaacaacagatctagaacctacgtttctacctctttcttgttcgacatgatgatcatctccatgttgggttaccaaatcgatgaattcttcgaagctgaagctgctccagctttcgctcaatgtattggtcaattgcaccaagtcgtcgacaaggttgttgatgaagtcattgacgaagtcgtcgataaggttgtcggtaaggtcgttggtaaggttgttggtaaggttgtcgacgaacgtgttgactctccaacccacgaagccattgccatctgtaacatcgaagcttctttaagaagattcgtcgatcacgttttgcaccaccaacatgtcttacacgcttctcaacaagaacaagacattttgtggagagaattgagagccttcttgcacgctcacgttgtccaaatggccgacaactccactttggctccaccaggtagaactttcttcgactgggttagaaccactgctgctgaccacgttgcctgtgcttactctttcgctttcgcttgttgtatcacctctgctactatcggtcaaggtcaatctatgttcgctaccgtcaacgaattgtacttggtccaagctgctgctcgtcacatgaccaccatgtgtagaatgtgtaacgacattggttccgtcgacagagatttcatcgaagctaacattaactccgttcacttcccagaattctccactttgtctttggttgctgacaagaagaaagctttggccagattggctgcctacgaaaagtcttgtttgactcacactttggaccaatttgaaaatgaagttttacaatctccacgtgtttcttctgctgcctccggtgatttcagaaccagaaaggttgccgttgttagattctttgctgatgtcactgacttctacgatcaattgtacattttgagagatttgtcctcttctttgaagcatgtcggaacc

SEQ ID NO: 18 - protein, 946 aa, Phaeosphaeria sp.
MFAKFDMLEEEARALVRKVGNAVDPIYGFSTTSCQIYDTAWAAMISKEEHGDKVWLFPESFKYLLEKQGEDGSWERHPRSKTVGVLNTAAACLALLRHVKNPLQLQDIAAQDIELRIQRGLRSLEEQLIAWDDVLDTNHIGVEMIVPALLDYLQAEDENVDFEFESHSLLMQMYKEKMARFSPESLYRARPSSALHNLEALIGKLDFDKVGHHLYNGSMMASPSSTAAFLMHASPWSHEAEAYLRHVFEAGTGKGSGGFPGTYPTTYFELNWVLSTLMKSGFTLSDLECDELSSIANTIAEGFECDHGVIGFAPRAVDVDDTAKGLLTLTLLGMDEGVSPAPMIAMFEAKDHFLTFLGERDPSFTSNCHVLLSLLHRTDLLQYLPQIRKTTTFLCEAWWACDGQIKDKWHLSHLYPTMLMVQAFAEILLKSAEGEPLHDAFDAATLSRVSICVFQACLRTLLAQSQDGSWHGQPEASCYAVLTLAESGRLVLLQALQPQIAAAMEKAADVMQAGRWSCSDHDCDWTSKTAYRVDLVAAAYRLAAMKASSNLTFTVDDNVSKRSNGFQQLVGRTDLFSGVPAWELQASFLESALFVPLLRNHRLDVFDRDDIKVSKDHYLDMIPFTWVGCNNRSRTYVSTSFLFDMMIISMLGYQIDEFFEAEAAPAFAQCIGQLHQVVDKVVDEVIDEVVDKVVGKVVGKVVGKVVDERVDSPTHEAIAICNIEASLRRFVDHVLHHQHVLHASQQEQDILWRELRAFLHAHVVQMADNSTLAPPGRTFFDWVRTTAADHVACAYSFAFACCITSATIGQGQSMFATVNELYLVQAAARHMTTMCRMCNDIGSVDRDFIEANINSVHFPEFSTLSLVADKKKALARLAAYEKSCLTHTLDQFENEVLQSPRVSSAASGDFRTRKVAVVRFFADVTDFYDQLYILRDLSSSLKHVGT

SEQ ID NO: 19 - DNA, 2856 bp, Gibberella fujikuroi
  CDS (1)..(2856)
atgccaggtaagatcgaaaacggtactccaaaggatttaaagactggtaacgatttcgtttctgctgccaagtctttgttggacagagctttcaaatctcaccactcttactacggtttatgttccacttcttgtcaagtttacgacactgcttgggttgccatgatcccaaagaccagagataatgtcaaacaatggttgttccctgaatgtttccactacttgttgaaaacccaagctgctgatggttcctggggttctttgccaaccactcaaaccgctggtatcttggataccgcttccgctgtcttggctttgctatgtcacgctcaagaaccattgcaaatcttggatgtttctccagatgaaatgggtttgagaatcgaacacggtgttacttctttgaagagacaattggctgtctggaacgacgtcgaggacactaaccacattggtgtcgaatttattattccagctttattgtccatgttggaaaaggaattggatgttccatctttcgaattcccatgtagatccatcttggaaagaatgcacggtgaaaagttgggtcacttcgatttggaacaagtctacggtaagccatcttctttactacattctttggaagctttcttaggtaagttagacttcgacagattgtcccaccacttgtaccacggttccatgatggcttctccatcctccactgctgcctacttgattggtgctaccaaatgggatgacgaagctgaggactacttgagacacgttatgagaaacggtgctggtcatggtaacggtggtatctccggtactttcccaaccacccatttcgaatgttcctggatcattgccactttgttgaaggttggtttcaccttgaaacaaattgacggtgacggtttgagaggtctatccactatcttattggaagctttacgtgacgaaaacggtgtcatcggtttcgctccaagaaccgctgatgtcgacgacaccgccaaggctttgttggctttgtctttagttaaccaacctgtctctccagatatcatgattaaggttttcgaaggtaaggaccattttaccactttcggttctgaacgtgatccatctttgacctctaacttgcacgtcttgttgtctttgttgaagcaatctaacttgtctcaataccatccacaaatcttaaagactactttgtttacctgtagatggtggtggggttctgaccattgtgtcaaggacaagtggaacttgtctcatttgtacccaaccatgttgttggtcgaagccttcactgaagtcttgcacttgattgacggtggtgaattgtcctctttgttcgatgaatctttcaaatgtaagatcggtttgtccattttccaagctgttttgagaatcatcttgactcaagacaacgatggttcctggagaggttacagagaacaaacctgttacgccattttggctttggtccaagctcgtcacgtttgtttcttcactcacatggtcgatagattacaatcttgtgtcgacagaggtttctcctggttaaagtcttgttccttccactctcaagacttgacttggacctccaagactgcttacgaagttggtttcgttgctgaagcctacaaattggctgctttgcaatctgcttctttggaagttccagctgctaccatcggtcactccgttacctctgctgtcccatcttctgacttggaaaagtacatgagattggtccgtaagactgctttgttctctccattggacgaatggggtttgatggcttccattattgaatcttctttctttgtcccattgttgcaagctcaaagagtcgaaatctacccaagagataatatcaaggttgacgaggacaagtacttgtccatcattccatttacctgggttggttgtaataacagatctagaactttcgcttctaacagatggttatatgacatgatgtacttatctttgttgggttaccaaactgacgaatacatggaagctgttgccggtccagttttcggtgatgtttctctattgcaccaaaccatcgacaaggttatcgacaacaccatgggtaacttggccagagccaacggtactgttcactctggtaacggtcaccaacacgaatctccaaacattggtcaagttgaggacactttgaccagattcaccaactccgttttgaaccacaaggacgtcttgaactcttcttcttctgaccaagataccttacgtcgtgaattcagaactttcatgcacgctcacatcacccaaatcgaagataactccagattctccaagcaagcctcctctgatgccttttcttctccagaacaatcttacttccaatgggttaactccactggtggttctcacgttgcttgtgcctactccttcgccttttccaactgtttgatgtccgctaacttattgcaaggtaaggatgctttcccatctggtactcaaaagtacttgatctcctccgtcatgagacacgctaccaacatgtgtcgtatgtacaacgatttcggttctattgccagagacaacgctgaaagaaacgttaactccattcacttccctgaattcactctatgtaacggtacttctcaaaacttggatgaaagaaaggaaagattattgaagatcgctacctacgaacaaggttacttggacagagctttggaagctttggaaagacaatccagagatgacgctggtgacagagctggttccaaggacatgagaaaattgaagattgtcaaattgttctgtgatgttaccgacttgtacgaccaattgtacgtcatcaaggacttgtcctcttccatgaag

SEQ ID NO: 20 - protein, 952 aa, Gibberella fujikuroi
MPGKIENGTPKDLKTGNDFVSAAKSLLDRAFKSHHSYYGLCSTSCQVYDTAWVAMIPKTRDNVKQWLFPECFHYLLKTQAADGSWGSLPTTQTAGILDTASAVLALLCHAQEPLQILDVSPDEMGLRIEHGVTSLKRQLAVWNDVEDTNHIGVEFIIPALLSMLEKELDVPSFEFPCRSILERMHGEKLGHFDLEQVYGKPSSLLHSLEAFLGKLDFDRLSHHLYHGSMMASPSSTAAYLIGATKWDDEAEDYLRHVMRNGAGHGNGGISGTFPTTHFECSWIIATLLKVGFTLKQIDGDGLRGLSTILLEALRDENGVIGFAPRTADVDDTAKALLALSLVNQPVSPDIMIKVFEGKDHFTTFGSERDPSLTSNLHVLLSLLKQSNLSQYHPQILKTTLFTCRWWWGSDHCVKDKWNLSHLYPTMLLVEAFTEVLHLIDGGELSSLFDESFKCKIGLSIFQAVLRIILTQDNDGSWRGYREQTCYAILALVQARHVCFFTHMVDRLQSCVDRGFSWLKSCSFHSQDLTWTSKTAYEVGFVAEAYKLAALQSASLEVPAATIGHSVTSAVPSSDLEKYMRLVRKTALFSPLDEWGLMASIIESSFFVPLLQAQRVEIYPRDNIKVDEDKYLSIIPFTWVGCNNRSRTFASNRWLYDMMYLSLLGYQTDEYMEAVAGPVFGDVSLLHQTIDKVIDNTMGNLARANGTVHSGNGHQHESPNIGQVEDTLTRFTNSVLNHKDVLNSSSSDQDTLRREFRTFMHAHITQIEDNSRFSKQASSDAFSSPEQSYFQWVNSTGGSHVACAYSFAFSNCLMSANLLQGKDAFPSGTQKYLISSVMRHATNMCRMYNDFGSIARDNAERNVNSIHFPEFTLCNGTSQNLDERKERLLKIATYEQGYLDRALEALERQSRDDAGDRAGSKDMRKLKIVKLFCDVTDLYDQLYVIKDLSSSMK

SEQ ID NO: 21 - DNA, 1533 bp, Lactuca sativa
  CDS (1)..(1533)
atggacttgcaaaccatggccccaatgggttctgctgctatcgccatcggtggtccagctgtcgccgttgctggtggtatctccttgttgttcttgaaatccttcttgtctcaacaaccaggtaacccaaaccacttgccatctgtcccagctgtcccaggtgttcctctattaggtaacttgttggaattgaaggaaaagaagccatacaagacctttaccaaatgggctgaaacttacggtccaatctactccatcaagaccggtgctacctccatggttgtcgttaactccaaccaattggccaaggaagctatggtcaccagattcgactccatctctaccagaaagttgtccaaggctttgcaaattttgactgctgacaagaccatggttgccatgtctgactacgatgactaccataaaactgtcaagagaaacttgttgacttctattttgggtccagctgctcaaaagagacacagagcccaccgtgacgctatgggtgacaacttgtccagacaattgcacgctttagctttgaactctcctcaagaagccattaacttcagacaaatcttccaatctgaattattcactttagctttcaagcaaactttcggtagagatatcgaatctatcttcgtcggtgatttgggtactaccatgaccagagaagaaatgttccaaattttggttgttgacccaatgatgggtgctattgacgttgactggagagacttcttcccatacttgaaatggattccaaacgccaaattggaagaaaagatcgaacaaatgtacatcagaagaaaggctgttatgaaggctgttatccaagaacacagaaagagaattgattctggtgaaaacttggattcttacattgatttcttgttggctgaagctcaaccattgactgaaaagcaattattgatgtccttgtgggaaccaattattgaaacttctgacaccaccatggttaccactgaatgggctatgtacgaattgtctaagcacccaaacaagcaacaaagattatacaatgaaatcagaaacatctgtggttctgaaaagatcactgaagaaaagttgtgtaagatgccatacttatctgctgtctttcacgaaactttacgtgttcactctccagtttccatcattccattacgttacgttcacgaaaacactgaattgggtggttaccatgtcccagctggtactgaattggctgtcaacatctacggttgtaacatggaaagagaaatctgggaaaacccagaagaatggtccccagaaagattcttggctgaaaacgaaccagttaacttgcaaaagaccatggcctttggtgctggtaagagagtctgtgccggtgctatgcaagctatgttgttggcttgtgtcggtattggtagaatggttcaagaattcgaatggagattgaaagatgacgtcgaagaagatgtcaacactttaggtttgaccactcaaagattgaacccaatgttggctgttatcaagcctaggaat

SEQ ID NO: 22 - protein, 511 aa, Lactuca sativa
MDLQTMAPMGSAAIAIGGPAVAVAGGISLLFLKSFLSQQPGNPNHLPSVPAVPGVPLLGNLLELKEKKPYKTFTKWAETYGPIYSIKTGATSMVVVNSNQLAKEAMVTRFDSISTRKLSKALQILTADKTMVAMSDYDDYHKTVKRNLLTSILGPAAQKRHRAHRDAMGDNLSRQLHALALNSPQEAINFRQIFQSELFTLAFKQTFGRDIESIFVGDLGTTMTREEMFQILVVDPMMGAIDVDWRDFFPYLKWIPNAKLEEKIEQMYIRRKAVMKAVIQEHRKRIDSGENLDSYIDFLLAEAQPLTEKQLLMSLWEPIIETSDTTMVTTEWAMYELSKHPNKQQRLYNEIRNICGSEKITEEKLCKMPYLSAVFHETLRVHSPVSIIPLRYVHENTELGGYHVPAGTELAVNIYGCNMEREIWENPEEWSPERFLAENEPVNLQKTMAFGAGKRVCAGAMQAMLLACVGIGRMVQEFEWRLKDDVEEDVNTLGLTTQRLNPMLAVIKPRN

SEQ ID NO: 23 - DNA, 1536 bp, Lactuca sativa
  CDS (1)..(1536)
atggatggtgtcattgacatgcaaaccattccattgagaaccgccattgccattggtggtactgctgttgctttggttgttgctctatacttctggttcttgagatcttacgcttctccatctcaccactctaaccatttgccacctgttccagaagttccaggtgtcccagtcttgggtaacttgttgcaattgaaagaaaagaagccatacatgactttcaccaaatgggctgaaatgtacggtccaatctactctatcagaactggtgctacctccatggttgttgtttcctctaacgaaattgccaaggaagttgttgtcactagattcccatccatctccaccagaaagttgtcttacgctttgaaggtcttgactgaagataagtccatggttgctatgtctgattaccatgactaccacaagaccgtcaaaagacacattttgactgctgtcttaggtccaaacgcccaaaagaagttccgtgctcacagagacaccatgatggaaaacgtttccaatgaattgcatgccttctttgaaaagaacccaaaccaagaagtcaacttgagaaagatcttccaatctcaattgttcggtttggccatgaagcaagctttgggtaaggatgtcgaatctatctacgtcaaggacttggaaactaccatgaagagagaagaaatctttgaagtcttggttgttgacccaatgatgggtgccattgaagtcgattggagagacttcttcccatacttgaaatgggttccaaacaaatctttcgaaaacatcattcacagaatgtacacccgtcgtgaagctgtcatgaaggctttgatccaagaacacaagaagagaattgcttctggtgaaaacttaaactcctacattgactacttgttgtctgaagctcaaactttgactgacaagcaattgttgatgtccctatgggaaccaatcattgaatcttccgacaccaccatggtcaccactgaatgggctatgtacgaattggctaagaatccaaacatgcaagacagattgtacgaagaaatccaatctgtttgtggttccgaaaagatcactgaagaaaacttgtctcaattaccatacttgtacgctgttttccaagaaactttgagaaagcactgtccagttccaatcatgccattgagatacgtccacgaaaacaccgttttgggtggttaccacgttccagctggtactgaagttgctatcaacatctatggttgtaacatggacaagaaggtctgggaaaacccagaagaatggaacccagaaagattcttatccgaaaaggaatccatggacttgtacaagaccatggccttcggtggtggtaagagagtttgtgctggttctttgcaagctatggtcatctcttgtatcggtattggtagattagtccaagattttgaatggaaattgaaagatgacgctgaagaagatgtcaacactttaggtttaaccactcaaaagttgcacccattattggctttgatcaaccctcgaaag

SEQ ID NO: 24 - protein, 512 aa, Lactuca sativa
MDGVIDMQTIPLRTAIAIGGTAVALVVALYFWFLRSYASPSHHSNHLPPVPEVPGVPVLGNLLQLKEKKPYMTFTKWAEMYGPIYSIRTGATSMVVVSSNEIAKEVVVTRFPSISTRKLSYALKVLTEDKSMVAMSDYHDYHKTVKRHILTAVLGPNAQKKFRAHRDTMMENVSNELHAFFEKNPNQEVNLRKIFQSQLFGLAMKQALGKDVESIYVKDLETTMKREEIFEVLVVDPMMGAIEVDWRDFFPYLKWVPNKSFENIIHRMYTRREAVMKALIQEHKKRIASGENLNSYIDYLLSEAQTLTDKQLLMSLWEPIIESSDTTMVTTEWAMYELAKNPNMQDRLYEEIQSVCGSEKITEENLSQLPYLYAVFQETLRKHCPVPIMPLRYVHENTVLGGYHVPAGTEVAINIYGCNMDKKVWENPEEWNPERFLSEKESMDLYKTMAFGGGKRVCAGSLQAMVISCIGIGRLVQDFEWKLKDDAEEDVNTLGLTTQKLHPLLALINPRK

SEQ ID NO: 25 - DNA, 1575 bp, Sphaceloma manihoticola
  CDS (1)..(1575)
atgatggacgacaccacttctccatactccacttaccactctgtcagatccattagaaaccaatctgcttgggctttggctccaattgctgtctttatttgttacgttgtcttgagacacaacagaaagtctgtcccagctgcctccgctggttctcactccatcttggaaccattatggttagctagattacgtttcatcagagactccagattcatcatcggtcaaggttactccaagttcaaggatactatcttcaaggttaccaaggtcggtgctgacatcatcgttgttgctccaaagtacgtcgaagaaatcagaagattgtctcgtgacaccggtagatctgttgaaccattcatccacgatttcgctggtgaattgttgggtggtttgaatttcttggaatctgatttgcaaaccagagttgtccaacaaaagttgaccccaaacttgaaaactattgtcccagtcatggaagatgaaatgcattacgctttggtttctgaattggattcttgtttggacggttccgaacactggaccagagttgacatgattcacatgttgtccagaatcgtttccagaatttctgccagaatcttcttgggtccaaagtactgtagaaacgacttatggttaaagaccaccgctgaatacactgaaaacttgttcttgaccggtactctattgagatttgtcccaagaatgttgcaaaagtggatcgctccattactaccatctttccgtcaattgcaagaaaacagacaagctgccagaaagatcatttctgaaattttgactgaccatcaaccagaaaagcacgatgaaacctctgacaacggtgacccatacccagatatcttgactttgatgttccaagctgcccgtggtaaggaaaaggacatcgaagatatcgctcaacacactttgttgctatctttgtcctccattcacactaccgctttgaccatgactcaagctttgtacgacttgtgtgcctacccacaatacttggaccctgttaagcacgaaattgctgacaccttgcaatctgaaggttcctggtctaaggctatgttggacaaattgcacatgatggactctttgttgagagaatctcaaagattatctcctgttttcttattgactttcaacagaattttgcacaccccattgactttgtccaacggtatccatttgccaaagggtactagaattgctgctccttctgatgccattttgaacgatccatctttagtcccaggtccacaaccagctgacactttcgacccatttagatacatcaaccactccactggtgatgctaagaaaaccaagaccaacttccaaaccacttctttgcaaaacatggctttcggttacggtaaatacgcttgtccaggtcgtttctatgttgccaacgaaatcaaattggttttaggtcacttgttgatgcactacgaattcaagttcccaccaggtatgggtagaccagttaactccaccgtcgatactgacatgtacccagatttgggtgccagattgttggttagaaagagaaagatggaagaa

SEQ ID NO: 26 - protein, 525 aa, Sphaceloma manihoticola
MMDDTTSPYSTYHSVRSIRNQSAWALAPIAVFICYVVLRHNRKSVPAASAGSHSILEPLWLARLRFIRDSRFIIGQGYSKFKDTIFKVTKVGADIIVVAPKYVEEIRRLSRDTGRSVEPFIHDFAGELLGGLNFLESDLQTRVVQQKLTPNLKTIVPVMEDEMHYALVSELDSCLDGSEHWTRVDMIHMLSRIVSRISARIFLGPKYCRNDLWLKTTAEYTENLFLTGTLLRFVPRMLQKWIAPLLPSFRQLQENRQAARKIISEILTDHQPEKHDETSDNGDPYPDILTLMFQAARGKEKDIEDIAQHTLLLSLSSIHTTALTMTQALYDLCAYPQYLDPVKHEIADTLQSEGSWSKAMLDKLHMMDSLLRESQRLSPVFLLTFNRILHTPLTLSNGIHLPKGTRIAAPSDAILNDPSLVPGPQPADTFDPFRYINHSTGDAKKTKTNFQTTSLQNMAFGYGKYACPGRFYVANEIKLVLGHLLMHYEFKFPPGMGRPVNSTVDTDMYPDLGARLLVRKRKMEE

SEQ ID NO: 27 - DNA, 1440 bp, Artemisia annua
  CDS (1)..(1440)
atgccaatgaccgtcatgttgttgttcgttttcttattattcattgccatctgtttcttcttggtccacagacacaactccaccaccaccaagaacttgccaccaggttctttcggttggccattcatcggtgaaactttggcttacatcagatccaagagaggtggtgacccagaaagattcaccaaggaaagaattgaaaagtacggttccactttagtctttaagacctctgttgctggtgaaagaatggctgtcttttgtggtccagaaggtaacaagttcttgtttggtaacgaaaacaaattggttgcttcctggtggccaaactctgttagaattttgttcgaaaagtgtttgattaccatcagaggtgacgaagctaaatggttacgtaaaatgatgttcgcttacttgggtccagacgctctatccaacagatacactggtactatggaagttgttaccagattgcacatccaaaaccactggcaaggtaagtctgaattgaaggtctttgaaaccgttagaccatacttgttcgaattggcctgtagattattcttgtctttggatgacccaaagcacgttgctgaattgggtactttattcaacactttcttgaagggtttgactgaattgccaatcaacattccaggtactagattctacagagccaagagagctgccaacgccatcaagaaacaattgattgtcatcatcaagcaacgtcgtcaagctttgaagcaagaagatcaatcttcttctttcgaagatttgctatctcatttgttagtctcctctgatgaaaacggtagattcttgtccgaagctgaaattgccaataatgtcttgttgttgttgtttgctggtcacgacacttctgctgtttccatcactttgttgatgaagtctttggctgaacaccctcaagtctacgacaacgttttgaaggaacaattaggtatcttggaagccaaggctccaggtgaaatgttgaactgggaagatatccaaaagatgagatactcctggtacgttgtttgtgaagtcatgagattgattccacctgttgttggttctttcagagaagctttggttgatttcgaatacgctggttacactattccaaagggttggaagatcatctggtctgctgtcatgactcacaaggaagaaaacaacttcccaaacgctactaagttcgacccatccagattcgaaggtgctggtccaaccccattcacctacgttccattcggtggtggtccaagaatgtgtttgggtaaggaattggctcgtgtcagaattttggttttcttacataacatcatgaccaaattcaaatgggacttgttgattccagacgaaaagatcggttacgacccattggctaccccagtcaagggtttgccagtcagattgcaccctcaccaagtg

SEQ ID NO: 28 - protein, 480 aa, Artemisia annua
MPMTVMLLFVFLLFIAICFFLVHRHNSTTTKNLPPGSFGWPFIGETLAYIRSKRGGDPERFTKERIEKYGSTLVFKTSVAGERMAVFCGPEGNKFLFGNENKLVASWWPNSVRILFEKCLITIRGDEAKWLRKMMFAYLGPDALSNRYTGTMEVVTRLHIQNHWQGKSELKVFETVRPYLFELACRLFLSLDDPKHVAELGTLFNTFLKGLTELPINIPGTRFYRAKRAANAIKKQLIVIIKQRRQALKQEDQSSSFEDLLSHLLVSSDENGRFLSEAEIANNVLLLLFAGHDTSAVSITLLMKSLAEHPQVYDNVLKEQLGILEAKAPGEMLNWEDIQKMRYSWYVVCEVMRLIPPVVGSFREALVDFEYAGYTIPKGWKIIWSAVMTHKEENNFPNATKFDPSRFEGAGPTPFTYVPFGGGPRMCLGKELARVRILVFLHNIMTKFKWDLLIPDEKIGYDPLATPVKGLPVRLHPHQV

SEQ ID NO: 29 - DNA, 1365 bp, Ricinus communis
  CDS (1)..(1365)
atggaattggtcatgttcccagtcttggctttggtttccactttgttcttgttggctttgcacttcatcatcagaactttgaaggaaagattattcggttctccaaatttgccaccaggtagattaggttggccattgattggtgaaaccccagctttcttcagagctggtttcgaagccaagccagaaaagttcatcggtgaaagaatggaaaagtacgactctcgtgttttcaagacctctttgttgggtaagcctttcgctgtcatttctggtactgctggtcacaagttcttgttttccaacgaaaacaaattggttaacttgtggtggccagaatccgtcagaatgttgttcaagtctgctttggtttccgttgttggtgacgaagccaagagaatcagaaagatgttgatgactttcttaggtttggatgctttgaagaactacactgaaagaattgacatggtcacccaacaacacatcagaacctactgggaaggtaaggaagaagttaccgtttactccactttgaaattgtacactttcaccttggcttgtaacttgtttgcctccatcaacgaccctgaaagattatccaagttgggtgctcacttcgatgttttcgttaagggtgttatctctttgccaatttccattccaggtactagattatacaaatccatgaaggctgccaacgccattagagaagaattgaaattgattgtccgtgacagaaaggaagctttggaaagaaagatggcttctccaactcaagatttgttgtcttatttgttggtcgactctgacaccaacggtcgtttcttgtctgaaatggaaatcttggacaacatcatgttgctattgtacgctgaacaattggaaattgctaactccaagaagccaggtgaattattgcaatgggaagatgtccaaaagatgagatactcctggaacgtcatctctgaagtcttgagattgtctccaccagtttcttctgcttacagacacgccattgttgactttacctacgaaggttacaccattccaaagggttggcaattgttcacctctttcggtactacccaccgtgacccagctttattcccaaacccagaaagattcgatgcttccagatttgaaggtaacggtccaccttcttactcttacatcccattcggtggtggtccaagaatgtgtattggttacgaatttgccagattggaaatgttgatcttcttacataacatcatcaagagattcaaatgggatatcttgatcccagatgaacaattcggttacaacccattattggctccatctcaaggtttcccagtcagattaagaccacaccactctcatcta

SEQ ID NO: 30 - protein, 455 aa, Ricinus communis
MELVMFPVLALVSTLFLLALHFIIRTLKERLFGSPNLPPGRLGWPLIGETPAFFRAGFEAKPEKFIGERMEKYDSRVFKTSLLGKPFAVISGTAGHKFLFSNENKLVNLWWPESVRMLFKSALVSVVGDEAKRIRKMLMTFLGLDALKNYTERIDMVTQQHIRTYWEGKEEVTVYSTLKLYTFTLACNLFASINDPERLSKLGAHFDVFVKGVISLPISIPGTRLYKSMKAANAIREELKLIVRDRKEALERKMASPTQDLLSYLLVDSDTNGRFLSEMEILDNIMLLLYAEQLEIANSKKPGELLQWEDVQKMRYSWNVISEVLRLSPPVSSAYRHAIVDFTYEGYTIPKGWQLFTSFGTTHRDPALFPNPERFDASRFEGNGPPSYSYIPFGGGPRMCIGYEFARLEMLIFLHNIIKRFKWDILIPDEQFGYNPLLAPSQGFPVRLRPHHSHL

SEQ ID NO: 31 - DNA, 1428 bp, Stevia rebaudiana
  CDS (1)..(1428)
atgattcaagttttgaccccaatcttgttgttcttgatcttcttcgtcttttggaaggtctacaagcaccaaaagaccaagatcaacttgcctccaggttctttcggttggccattcttgggtgaaactttagctttgttgagagctggttgggactctgaaccagaaagattcgttagagaaagaatcaagaagcatggttctccattggttttcaagacctctttgttcggtgacagattcgctgtcttgtgtggtccagctggtaacaaattcttgttctgtaacgaaaacaaattggttgcttcctggtggccagttccagttagaaagttgttcggtaagtccttgttgactatcagaggtgacgaagccaagtggatgagaaagatgttattgtcttacttgggtccagatgcctttgctacccactacgctgtcaccatggacgttgttacccgtcgtcacattgatgtccactggagaggtaaggaagaagttaacgttttccaaaccgtcaaattgtacgctttcgaattggcttgtagattattcatgaacttggatgacccaaaccatattgccaaattaggttctttattcaacatcttcttgaagggtatcatcgaattgccaattgatgttccaggtactagattctactcctccaagaaggctgctgctgccatcagaattgaattgaagaaattgatcaaggccagaaagttggaattgaaggaaggtaaggcttcttcctctcaagatttgctatcccacttattgacctctccagacgaaaatggtatgttcttgactgaagaagaaattgtcgacaacatcttattgctattgttcgctggtcacgacacctctgctctatccattactttgttgatgaaaactttgggtgaacactctgatgtttacgacaaggtcttaaaggaacaattggaaatctccaagactaaggaagcttgggaatctttgaaatgggaagatatccaaaagatgaagtactcctggtctgttatctgtgaagtcatgagattgaaccctccagtcattggtacttacagagaagctttggtcgatatcgactacgctggttacaccattccaaagggttggaagttgcactggtctgccgtttccactcaaagagatgaagctaacttcgaagatgtcaccagatttgacccatctcgtttcgaaggtgctggtccaactccattcacttttgttccattcggtggtggtccaagaatgtgtttgggtaaggaattcgctagattagaagttttggctttcttgcacaacattgtcaccaactttaaatgggacttgttgattccagacgaaaagatcgaatacgacccaatggctactccagccaagggtttgccaatcagattgcaccctcaccaagtc

SEQ ID NO: 32 - protein, 476 aa, Stevia rebaudiana
MIQVLTPILLFLIFFVFWKVYKHQKTKINLPPGSFGWPFLGETLALLRAGWDSEPERFVRERIKKHGSPLVFKTSLFGDRFAVLCGPAGNKFLFCNENKLVASWWPVPVRKLFGKSLLTIRGDEAKWMRKMLLSYLGPDAFATHYAVTMDVVTRRHIDVHWRGKEEVNVFQTVKLYAFELACRLFMNLDDPNHIAKLGSLFNIFLKGIIELPIDVPGTRFYSSKKAAAAIRIELKKLIKARKLELKEGKASSSQDLLSHLLTSPDENGMFLTEEEIVDNILLLLFAGHDTSALSITLLMKTLGEHSDVYDKVLKEQLEISKTKEAWESLKWEDIQKMKYSWSVICEVMRLNPPVIGTYREALVDIDYAGYTIPKGWKLHWSAVSTQRDEANFEDVTRFDPSRFEGAGPTPFTFVPFGGGPRMCLGKEFARLEVLAFLHNIVTNFKWDLLIPDEKIEYDPMATPAKGLPIRLHPHQV

SEQ ID NO: 33 - DNA, 1575 bp, Arabidopsis thaliana
  CDS (1)..(1575)
atggaatctttagtcgttcacaccgtcaatgccatctggtgtattgtcattgttggtattttctctgttggttaccacgtttacggtcgtgccgttgttgaacaatggagaatgagaagatctttgaaattgcaaggtgtcaagggtccaccaccatccattttcaacggtaatgtctctgaaatgcaaagaatccaatctgaagctaagcactgttccggtgacaacatcatttctcacgattactcctcctctttgttccctcactttgaccactggagaaagcaatacggtagaatctacacctactccactggtttgaaacaacatttgtacatcaaccatccagaaatggtcaaggaattatctcaaaccaacactttgaacttaggtcgtatcactcacatcaccaagagattgaacccaatcttaggtaacggtatcatcacttccaacggtccacactgggctcatcaaagaagaattattgcttacgaattcacccacgacaaaatcaagggtatggtcggtttgatggtcgaatctgccatgccaatgttgaacaaatgggaagaaatggttaagagaggtggtgaaatgggttgtgacatccgtgttgacgaagatttgaaggatgtttctgctgatgtcattgctaaggcttgtttcggttcctctttctccaagggtaaggctatcttctccatgatcagagacttgttgactgccatcactaagagatctgttttgttcagattcaacggtttcaccgacatggttttcggttccaagaagcatggtgatgtcgatatcgatgctttggaaatggaattggaatcttctatctgggaaaccgttaaggaaagagaaattgaatgtaaggacactcacaagaaggatttgatgcaattaatcttggaaggtgccatgagatcttgtgacggtaacttgtgggacaagtctgcttacagaagatttgttgtcgacaactgtaaatccatctactttgccggtcacgactctactgctgtctccgtttcctggtgtttgatgttgctagctttgaacccatcctggcaagtcaagatcagagatgaaatcttatcttcttgtaagaacggtattccagatgctgaatccattccaaacttgaagaccgttaccatggtcattcaagaaactatgagattgtacccaccagctccaattgtcggtagagaagcttccaaggacatcagattaggtgacttggttgttccaaagggtgtttgtatctggactttgattccagctttgcaccgtgacccagaaatctggggtccagatgctaacgacttcaagccagaaagattctctgaaggtatttccaaggcttgtaaatacccacaatcttacatcccattcggtttgggtccaagaacctgtgtcggtaagaacttcggtatgatggaagtcaaagttttggtttctttgattgtttccaagttctctttcaccttgtctccaacttaccaacactctccatctcacaagttgttggttgaacctcaacacggtgttgtcattagagtcgtt

SEQ ID NO: 34 - protein, 525 aa, Arabidopsis thaliana
MESLVVHTVNAIWCIVIVGIFSVGYHVYGRAVVEQWRMRRSLKLQGVKGPPPSIFNGNVSEMQRIQSEAKHCSGDNIISHDYSSSLFPHFDHWRKQYGRIYTYSTGLKQHLYINHPEMVKELSQTNTLNLGRITHITKRLNPILGNGIITSNGPHWAHQRRIIAYEFTHDKIKGMVGLMVESAMPMLNKWEEMVKRGGEMGCDIRVDEDLKDVSADVIAKACFGSSFSKGKAIFSMIRDLLTAITKRSVLFRFNGFTDMVFGSKKHGDVDIDALEMELESSIWETVKEREIECKDTHKKDLMQLILEGAMRSCDGNLWDKSAYRRFVVDNCKSIYFAGHDSTAVSVSWCLMLLALNPSWQVKIRDEILSSCKNGIPDAESIPNLKTVTMVIQETMRLYPPAPIVGREASKDIRLGDLVVPKGVCIWTLIPALHRDPEIWGPDANDFKPERFSEGISKACKYPQSYIPFGLGPRTCVGKNFGMMEVKVLVSLIVSKFSFTLSPTYQHSPSHKLLVEPQHGVVIRVV

SEQ ID NO: 35 - DNA, 1437 bp, Ixeris dentata var. albiflora
  CDS (1)..(1437)
atggatgccgttgccgtcaactctgaaaccatgtcccacgttgttttcattccattcccagctcaatctcacatcaagtgtatgttgaagttggcccgtctattacaccacaagggtttacacatcactttcgtcaacactgaattgaaccacaaccaattgttatcttctggtggtccaaactctttggacggtgaaccaggtttcagattcaagaccattccagatggtgttccagaaggtgctccagacttcatgtacgctttatgtgactctgtcttgaacaaaatgttggacccatttgtcgatttgattggtagattggaatctccagccacctgtatcatcggtgacggtatgatgcctttcactgttgctgctgctgaaaagttgaaattgccaattatgcatttctggactttcccagctgctgctttcttgggttactaccaagctccaaacttgattgaaaagggtttcatcccacctaaggacgaatcctggtccaccaacggttacttggaaaccgttgttgactccatttctggtttggaaggtttcagaatcagagatatcccagcttacttcagaaccactgacccaaacgattctgatttcaactacatcatcgaatgtgttaaggccatcagaaaggtttccaacattgtcttgcacactttcgaagaattggaatctaccattatcaaggccttgcaaccaatgatcccacacgtctacaccattggtccattggaattgttgttgaacccaatcaagttagaagaagaaactgaaaagttggacattaaaggttactctttatggaaggaagatgacgaatgtttgaaatggttggactccaaggaaccaaactccgtcatttacgtcaactttggttctttgatctccatgtccaaggaacaattagctgaatttggttggggtttggttaactctaaccactgtttcttgtgggttatcagaagagacttggttgtcggtgattctgctccattgcctccagaattgaaagaacgtatcaacgaaagaggtttcatcgcttcctggtgtccacaagaaaaggtcttgaaacattcctctgttggtggtttcttgactcactgtggttggggttccatcatcgaatctctatctgctggtgtcccaatgttgtgttggccatacttgtgggaccaaccaaccaactgtcgtcaagcttgtaaggaatgggaagttggtttggaaattgaaggtaacgttaacaaggatgaagtcgaaagattgaccagagaattgatcggtggtgaaaagggtaagcaaatgagatccaaggctttggaatggaagaagaagatcgaaattgctactggtccaaagggttcttcttctttaaatgtcgaaagattggctaacgacattaacatgttctccagaaat

SEQ ID NO: 36 - protein, 479 aa, Ixeris dentata var. albiflora
MDAVAVNSETMSHVVFIPFPAQSHIKCMLKLARLLHHKGLHITFVNTELNHNQLLSSGGPNSLDGEPGFRFKTIPDGVPEGAPDFMYALCDSVLNKMLDPFVDLIGRLESPATCIIGDGMMPFTVAAAEKLKLPIMHFWTFPAAAFLGYYQAPNLIEKGFIPPKDESWSTNGYLETVVDSISGLEGFRIRDIPAYFRTTDPNDSDFNYIIECVKAIRKVSNIVLHTFEELESTIIKALQPMIPHVYTIGPLELLLNPIKLEEETEKLDIKGYSLWKEDDECLKWLDSKEPNSVIYVNFGSLISMSKEQLAEFGWGLVNSNHCFLWVIRRDLVVGDSAPLPPELKERINERGFIASWCPQEKVLKHSSVGGFLTHCGWGSIIESLSAGVPMLCWPYLWDQPTNCRQACKEWEVGLEIEGNVNKDEVERLTRELIGGEKGKQMRSKALEWKKKIEIATGPKGSSSLNVERLANDINMFSRN

SEQ ID NO: 37 - DNA, 1446 bp, Ricinus communis
  CDS (1)..(1446)
atgggttccattgtccgtgaccacgacaagccacacgttgtttgtgttccatacccagctcaaggtcacgttaacccaatggtcaaattggccaagttgttgcactacaacgatttccacgtcactttcgtcaacactgaatacaaccacagaagattattgaactccagaggtccttcttctttggacggtttgccagatttcagattcgaagccatctctgacggtttgccaccatctgatgctaacgctacccaagatatcccatctctatgtgactctacctccaagaactctttggctccattcagaaacttgttgttgaagttgaaatcctctgactctttgccaccagttacctgtatcatttctgatgcttgtatgtccttcactttggatgctgctgaagaatttggtattccagaaatcttattctggaccccatcttcttgtggtgttttgggttactctcaataccacactttgattgaaaagggtttgactccattaaaggacgcctcttacttgaccaacggttacttggaaaccactttggactggattccaggtatgaaggatatcagattcagagatttgccatctttcatcagaaccactgacagaaacgatatcatgttgaactttgttgtccgtgaattggaaagaacttccagagcttctgctgttgttttcaacactttctacgccttcgaaaaggacgtcttagatgtcttatccaccatgttcccaccaatctactccatcggtccattgcaattgttggttgaccaaatcccaattgacagaaacttgggtaacattggttccaacttatggaaggaacaaccagaatgtattgactggttggacaccaaggaaccaaactctgttgtctacgtcaacttcggttccatcactgttatcactcctcaacaaatgattgaattcgcttggggtctagcttcttctaagaaaccattcttatggatcatcagaccagacttggttatcggtgaaaacgctatgttgccagctgaattcgtttctgaaaccaaggatcgtggtatgttggcttcttggggtcctcaagaacaaattttgaaacatccagctgtcggtggtttcttgtctcacatgggttggaactccactttggactccatgtccggtggtgtcccaatggtttgttggccattctttgctgaacaacaaaccaactgtagatttgcttgtaccgaatggggtgttggtatggaaattgacaacaatgtcaagagagatgaagtcaagaagttggttgaagttttgatggacggtaagaaaggtaaggaaatgaagtccaaggccatggaatggaaaaccaaggctgaagaagctgccaagccaggtggttcctctcataacaacttggacagattagtcaagttcatcaagggtcaaaagaat

SEQ ID NO: 38 - protein, 482 aa, Ricinus communis
MGSIVRDHDKPHVVCVPYPAQGHVNPMVKLAKLLHYNDFHVTFVNTEYNHRRLLNSRGPSSLDGLPDFRFEAISDGLPPSDANATQDIPSLCDSTSKNSLAPFRNLLLKLKSSDSLPPVTCIISDACMSFTLDAAEEFGIPEILFWTPSSCGVLGYSQYHTLIEKGLTPLKDASYLTNGYLETTLDWIPGMKDIRFRDLPSFIRTTDRNDIMLNFVVRELERTSRASAVVFNTFYAFEKDVLDVLSTMFPPIYSIGPLQLLVDQIPIDRNLGNIGSNLWKEQPECIDWLDTKEPNSVVYVNFGSITVITPQQMIEFAWGLASSKKPFLWIIRPDLVIGENAMLPAEFVSETKDRGMLASWGPQEQILKHPAVGGFLSHMGWNSTLDSMSGGVPMVCWPFFAEQQTNCRFACTEWGVGMEIDNNVKRDEVKKLVEVLMDGKKGKEMKSKAMEWKTKAEEAAKPGGSSHNNLDRLVKFIKGQKN

SEQ ID NO: 39 - DNA, 1374 bp, Ixeris dentata var. albiflora
  CDS (1)..(1374)
atggctgaagaacacaacaagaccaacaactcttctcctcacgttgtcatcttcccattcccatctcaaggtcacattaacccattgattcaatttgccaagagattgtcctccaagggtgtcaagccaactttgatcactaccatctacattgctaagacctctccatacccaaactcttccattgttgttgaaccaatttctgatggtttcgacgacggtggtttcaagtctgccacttctgctgaatcttacattgacactttccaccaagttggttccaaatctctagctaacttgatcagaaagttggtcaacgaaggtaaccatgtcgatgctatcatctacgactctttcgtcacctgggctttggatgttgctatggaatacggtattgacggtggttgtttcttcacccaagcttgtgctgtcaacaacatctactaccatgtttacaagggtgtcttggaaattccattgcaagctgctgctccaccaaccgtcactatcttattgcctgaattgcctcaattacaattatgggaaactccatcctttgtccacaacccaggtccatacccaggttgggctcacattgttttcaaccaattcccaaacatccacaacgccagatgggttttctccaacactttcttcaaattggaagaacaagttatcaaatggatgagattgatgtggccattgatggttgtcggtccaactgttccatccatgtacttggacaagagattagaagatgacgatgactacggtatgtctttgttgaagccaaaccacattgaatgtatgggttggttgaataacaaaccaaagggttccgttgtctacgtttccttcggttcctacggtgaattaggtgttgctcaaatggaagaaattgcttggggtttgaacgaatcttccgtcaactatttatgggttgtcagagaaactgaaaaggaaaagttgccaaagtctttcttggctaatggtttgattgttgaatggtgtcgtcaattggaagttttggctcacgaagctgtcggttgtttcgtcactcactgtggtttcaactcctctttggaaaccatctctttgggtgtcccagttgttgccatcccacaatggaccgatcaaaccaccaacgctaagtgtttggaagatatctggggtgttggtatcagagccaagactccagtcaccagaaccaacttggtctggtgtatcaaggaaatcatggaaggtgaacgtggtgctgttgctagaaagaacgccatcaagtggaaggacttggccattgaagctgtctctccaggtggttcctctgacaaggacatcaacgaatttgtttctcaattgtctccaatcaaatgt

SEQ ID NO: 40 - protein, 458 aa, Ixeris dentata var. albiflora
MAEEHNKTNNSSPHVVIFPFPSQGHINPLIQFAKRLSSKGVKPTLITTIYIAKTSPYPNSSIVVEPISDGFDDGGFKSATSAESYIDTFHQVGSKSLANLIRKLVNEGNHVDAIIYDSFVTWALDVAMEYGIDGGCFFTQACAVNNIYYHVYKGVLEIPLQAAAPPTVTILLPELPQLQLWETPSFVHNPGPYPGWAHIVFNQFPNIHNARWVFSNTFFKLEEQVIKWMRLMWPLMVVGPTVPSMYLDKRLEDDDDYGMSLLKPNHIECMGWLNNKPKGSVVYVSFGSYGELGVAQMEEIAWGLNESSVNYLWVVRETEKEKLPKSFLANGLIVEWCRQLEVLAHEAVGCFVTHCGFNSSLETISLGVPVVAIPQWTDQTTNAKCLEDIWGVGIRAKTPVTRTNLVWCIKEIMEGERGAVARKNAIKWKDLAIEAVSPGGSSDKDINEFVSQLSPIKC

SEQ ID NO: 41 - DNA, 1362 bp, Populus trichocarpa
  CDS (1)..(1362)
atggacaacaagaagtctcatgtcattgtcttgacctacccagctcaaggtcacatcaacccattgttgcaattcgccaagagattagcttccaagggtttgaaggccactttggctaccacctactacactgttaactccattgacgctccaactgtcggtgttgaaccaatctctgatggtttcgatgaaggtggtttcaagcaagcttcctctctagatgtctacttggaatctttcaagaccgtcggttccagaaccttgactgaattagtctttaaattcaaggcttctggttctcctgttaactgtgttgtttacgactccatgttgccatgggctttggacgttgccagagatttgggtatctacgctgctgccttcatgaccacctctgcttccgtctgttccatgtactggagaattgacttaggtttattgtctttgccattgaagcaacaaaccgctaccgtttctttgccaggtttgccaccattgggttgttgtgatttgccatctttcttagctgaaccaacttctcaaactgcttacttggaagttatcatggaaaagttccactccttgaacgaagatgactgggttttctgtaactctttcgaagatttggaaattgaattggtcaaggctatgagaggtaaatggccattggttatggttggtccaatggttccatctgcctacttggaccaacaaattgatggtgaccgtgcctacggtgcttctttgtggaaaccaacttcttctcaatgtttcacctggttggacactaagcctccaagatctgtcatctacgtttcctttggttccatgggtaacatctccgctgaacaagttgaagaaattgcttggggtttgaaggcttccaacagaccattcttatgggttatgaaggaatctgaaaagaaattgccaactggtttcttgaactctgtcggtgaaaccggtatggttgtttcctggtgtaaccaattggaagtcttggctcaccaagctatcggttgtttcgtcacccactgtggttggaactccactttggaaggtttgggtttaggtgttccaatggtttgtgttactgaaagatctgaccaaccaatgaacgctaagttcgttgaagatgtctggaaggtcggtgtcagagctaagaaggacgaagttggtattgtcactagagaagaattggaaaagtgtatcagaggtgtcatggacggtgaaaacggtgaagaaatcaagagaaacgccaacaaatggagagaattagctcgttctgccgtttccgtcggtggttcttctgacatgaacatcaatgaatttgttgtcaaattgttggaaggtaagaagggg

SEQ ID NO: 42 - protein, 454 aa, Populus trichocarpa
MDNKKSHVIVLTYPAQGHINPLLQFAKRLASKGLKATLATTYYTVNSIDAPTVGVEPISDGFDEGGFKQASSLDVYLESFKTVGSRTLTELVFKFKASGSPVNCVVYDSMLPWALDVARDLGIYAAAFMTTSASVCSMYWRIDLGLLSLPLKQQTATVSLPGLPPLGCCDLPSFLAEPTSQTAYLEVIMEKFHSLNEDDWVFCNSFEDLEIELVKAMRGKWPLVMVGPMVPSAYLDQQIDGDRAYGASLWKPTSSQCFTWLDTKPPRSVIYVSFGSMGNISAEQVEEIAWGLKASNRPFLWVMKESEKKLPTGFLNSVGETGMVVSWCNQLEVLAHQAIGCFVTHCGWNSTLEGLGLGVPMVCVTERSDQPMNAKFVEDVWKVGVRAKKDEVGIVTREELEKCIRGVMDGENGEEIKRNANKWRELARSAVSVGGSSDMNINEFVVKLLEGKKG

SEQ ID NO: 43 - DNA, 1377 bp, Nicotiana tabacum
  CDS (1)..(1377)
atgaccactcaaaaggctcactgtttgatcttaccatacccagctcaaggtcacatcaacccaatgttgcaattttccaagagattacaatctaagggtgtcaagatcaccattgctgctaccaagtctttcttaaagaccatgcaagaattgtccacttctgtctctgttgaagctatctctgatggttacgatgacggtggtagagaacaagctggtactttcgttgcttacatcaccagattcaaggaagttggttctgacactctatcccaattaatcggtaagttgaccaactgtggttgtccagtttcttgtatcgtctacgatcctttcttgccatgggctgtcgaagtcggtaacaactttggtgttgccactgctgctttcttcactcaatcttgtgctgttgacaacatctactaccatgtccacaaaggtgttttgaaattgccaccaactgatgttgacaaggaaatttccattccaggtttgttgaccattgaagcttctgatgttccatctttcgtttccaacccagaatcttccagaatcttggaaatgttggtcaaccaattctccaatttggaaaacactgactgggttttgatcaactctttctacgaattggaaaaggaagtcattgactggatggccaagatctacccaatcaagaccattggtccaaccattccatccatgtacttggacaaaagattaccagatgacaaggaatacggtttgtccgtctttaaaccaatgaccaatgcttgtttgaactggttgaaccaccaaccagtttcttccgttgtctacgtttctttcggttctttggctaagttggaagctgaacaaatggaagaattggcttggggtttgtccaactccaacaagaacttcttatgggttgtcagatctactgaagaatccaaattgccaaacaacttcttggaagaattggcttctgaaaagggtttggttgtttcctggtgtccacaattacaagttttggaacacaagtccatcggttgtttcttgactcactgtggttggaactctactttggaagccatctctttgggtgttccaatgattgccatgcctcactggtctgaccaaccaaccaacgccaagttggtcgaagatgtctgggaaatgggtatcagaccaaagcaagatgaaaagggtttagtccgtcgtgaagtcattgaagaatgtatcaagattgtcatggaagaaaagaagggtaagaagatcagagaaaacgccaagaaatggaaggaattggccagaaaggctgttgacgaaggtggttcttctgacagaaacattgaagaattcgtttccaaattggtcaccattgcttctgtcgagagt

SEQ ID NO: 44 - protein, 459 aa, Nicotiana tabacum
MTTQKAHCLILPYPAQGHINPMLQFSKRLQSKGVKITIAATKSFLKTMQELSTSVSVEAISDGYDDGGREQAGTFVAYITRFKEVGSDTLSQLIGKLTNCGCPVSCIVYDPFLPWAVEVGNNFGVATAAFFTQSCAVDNIYYHVHKGVLKLPPTDVDKEISIPGLLTIEASDVPSFVSNPESSRILEMLVNQFSNLENTDWVLINSFYELEKEVIDWMAKIYPIKTIGPTIPSMYLDKRLPDDKEYGLSVFKPMTNACLNWLNHQPVSSVVYVSFGSLAKLEAEQMEELAWGLSNSNKNFLWVVRSTEESKLPNNFLEELASEKGLVVSWCPQLQVLEHKSIGCFLTHCGWNSTLEAISLGVPMIAMPHWSDQPTNAKLVEDVWEMGIRPKQDEKGLVRREVIEECIKIVMEEKKGKKIRENAKKWKELARKAVDEGGSSDRNIEEFVSKLVTIASVES

SEQ ID NO: 45 - DNA, 1434 bp, Vaccaria hispanica
  CDS (1)..(1434)
atgtccaacaatgaaaacaatgccactcaagttatcgttttgccataccacggtcaaggtcacatgaacaccatggttcaatttgccaagagattagcttggaagggtgtccacgtcaccattgctaccactttcaacactatccaacaaatgaaattgaacatttcttcttacaactccatcactttggaaccaatctacgatgacactgatgactccactttgcacatcaaggacagaatggccagatttgaagctgaagccgcttccaatttgaccagagttttggaagccaagaaacaacaacaagctttaaacaagaagtgtttgttggtttaccacggttctttgaactgggctttagtcgttgctcaccaacaaaacgttgctggtgctgctttcttcaccgctgcttctgcttctttcgcttgttactactacttgcatttggaatctcaaggtaagggtgtcgacttggaagaattaccatccatcttaccaccaccaaaggtcattgttcaaaagttgccaaagtctttcttagcttacggtgacaacaactctcacaacaacaacaacaacaacaacaacaacaacaacaacaacaacatgggtttgcacccattggtcttgtggttgttgaaagattacggtaactccgtcaaggctgacttcgttttgttgaactctttcgacaaattggaagaagaagctatcaaatggatctctaacatctgttccgtcaagactatcggtccaaccattccatctacctacttggacaagcaaattgaaaacgatgttgactacggtttcaaccaatacaagccaaccaatgaagattgtatgaaatggttggacaccaaggaagccaactccgttgtctacatcgccttcggttctgttgctcgtttgtctgtcgaacaaatggctgaaattgctaaggctttggaccattcttccaagtctttcatctgggttgtcagagaaactgaaaaggaaaagttgccagtcgatttggttgaaaagatctctggtcaaggtatggttgtcccatgggctcctcaattggaagttttggctcacgatgctgtcggttgtttcgtttctcactgtggttggaactccaccattgaagctttgtctttcggtgttccaattttggccatgcctcaattcttagatcaattggtcgatgctcatttcgttgacagagtctggggtgtcggtattgctccaactgtcgatgaaaacgatttggttactcaagaagaaatctccagatgtctagacgaaatgatgggtggtggtccagaaggtgaaaagatcaagaagaacgttgccatgtggaaggaattgaccaaggaagctttggacaagggtggttcctctgacaagcacattgacgaaatcattgaatggttatcttcctcc

SEQ ID NO: 46 - protein, 478 aa, Vaccaria hispanica
MSNNENNATQVIVLPYHGQGHMNTMVQFAKRLAWKGVHVTIATTFNTIQQMKLNISSYNSITLEPIYDDTDDSTLHIKDRMARFEAEAASNLTRVLEAKKQQQALNKKCLLVYHGSLNWALVVAHQQNVAGAAFFTAASASFACYYYLHLESQGKGVDLEELPSILPPPKVIVQKLPKSFLAYGDNNSHNNNNNNNNNNNNNNMGLHPLVLWLLKDYGNSVKADFVLLNSFDKLEEEAIKWISNICSVKTIGPTIPSTYLDKQIENDVDYGFNQYKPTNEDCMKWLDTKEANSVVYIAFGSVARLSVEQMAEIAKALDHSSKSFIWVVRETEKEKLPVDLVEKISGQGMVVPWAPQLEVLAHDAVGCFVSHCGWNSTIEALSFGVPILAMPQFLDQLVDAHFVDRVWGVGIAPTVDENDLVTQEEISRCLDEMMGGGPEGEKIKKNVAMWKELTKEALDKGGSSDKHIDEIIEWLSSS

SEQ ID NO: 47 - DNA, 1443 bp, Streptococcus mutans
  CDS (1)..(1443)
atgccaatcatcaacaagaccatgttgatcacttacgctgactctctaggtaagaacttgaaagaattgaatgaaaacattgaaaactacttcggtgatgctgtcggtggtgttcacttgttgcctttcttcccatccaccggtgacagaggtttcgctccaattgactaccatgaagtcgactccgccttcggtgactgggatgacgttaagtgtttgggtgaaaagtactacttgatgtttgacttcatgatcaaccacatctccagacaatctaagtactacaaggactaccaagaaaagcacgaagcttctgcttacaaggatttgttcttgaactgggacaaattctggccaaagaacagaccaactcaagaagatgtcgacttgatctacaagagaaaggaccgtgccccaaagcaagaaatccaatttgccgatggttctgttgaacacttatggaacactttcggtgaagaacaaatcgatttggatgtcaccaaggaagttaccatggacttcatcagatccaccattgaaaacttggctgctaacggttgtgacttgatcagattggatgctttcgcttacgctgttaagaagctagacaccaacgatttcttcgtcgaaccagaaatctggactttgttggacaaggtccgtgacattgctgctgtttctggtgctgaaattttgccagaaattcacgaacattacactatccaattcaagattgctgaccacgactactacgtttacgactttgctttgccaatggttactttatactctttgtactcctccaaggtcgacagattagctaaatggttgaaaatgtctccaatgaagcaattcaccactttggacacccacgacggtattggtgttgtcgatgtcaaggatatcttgaccgatgaagaaatcacttacacttccaatgaattatacaaggtcggtgccaacgttaacagaaaatactctactgctgaatacaacaacttggatatctaccaaatcaactctacctactactctgctttgggtgacgatgaccaaaagtatttcttggccagattaatccaagctttcgctccaggtatcccacaagtctactacgttggtttcttggccggtaagaacgatttggaattgttggaatccaccaaggaaggtagaaacatcaacagacactactactcttctgaagaaattgctaaggaagtcaaaagaccagttgttaaggctttgttgaacttattcacttacagaaaccaatctgctgcctttgacttggatggtagaattgaagttgaaaccccaaacgaagctaccattgttattgaaagacaaaacaaagatggttcccacattgccaaggctgaaatcaacttgcaagacatgacttaccgtgtcactgaaaacgaccaaaccatttctttcgaa

SEQ ID NO: 48 - protein, 481 aa, Streptococcus mutans
MPIINKTMLITYADSLGKNLKELNENIENYFGDAVGGVHLLPFFPSTGDRGFAPIDYHEVDSAFGDWDDVKCLGEKYYLMFDFMINHISRQSKYYKDYQEKHEASAYKDLFLNWDKFWPKNRPTQEDVDLIYKRKDRAPKQEIQFADGSVEHLWNTFGEEQIDLDVTKEVTMDFIRSTIENLAANGCDLIRLDAFAYAVKKLDTNDFFVEPEIWTLLDKVRDIAAVSGAEILPEIHEHYTIQFKIADHDYYVYDFALPMVTLYSLYSSKVDRLAKWLKMSPMKQFTTLDTHDGIGVVDVKDILTDEEITYTSNELYKVGANVNRKYSTAEYNNLDIYQINSTYYSALGDDDQKYFLARLIQAFAPGIPQVYYVGFLAGKNDLELLESTKEGRNINRHYYSSEEIAKEVKRPVVKALLNLFTYRNQSAAFDLDGRIEVETPNEATIVIERQNKDGSHIAKAEINLQDMTYRVTENDQTISFE

SEQ ID NO: 49 - DNA, 1392 bp, Lobelia erinus
  CDS (1)..(1392)
atggacaacaaccatttgggtgaaactttgttgccattggctccaaagaacggtagaagagtcttgttcttcccatacccattacaaggtcacatttctccaatgttgaacttggccaacttgttgcactccaagggtttcaccatcaccatcatccacaccaatttgaactctccaaaccaatctgactacccacacttcactttcagaccatttgatgacggtttcccaccatactccaagggttggcaattggctaccttgtgttccagatgtgttgaaccattcagagaatgtttggctcaaatcttcttgtctgaccacactgctccagaaggtgaaagagaatctattgcttgtttgattgctgatggtttatggaacttcttgggtgctgctgtctacaactttaaattgccaatgattgttttgagaactggtaacatgtctaacattgttgccaacgttaagttgccatgtttcatcgaaaagggttacttcgaccataccaaggaaggttccaagttggaagctgctgtcccagaattcccaaccatcaagttcaaagatatcttgaaaacctacggttctaacccaaaggccatctgtgaaactttgactgctttgttgaaggaaatgagagcttcttctggtgtcatctggaactcttgtaaggaattagaacaatctgaattacaaatgatctgtaaggaattcccagttcctcatttcttgattggtcctttgcacaaatacttcccagcttcttcttcttccttggttgcccacgacccatcttccatttcctggttgaactccaaggctccaaactctgttttgtacgtttctttcggttccatctcttccatggacgaagctgaatttctagaaactgcttggggtttggccaactccatgcaacaattcttatgggttgtcagaccaggttctgtcagaggttctcaatggttggaatctttaccagatggtttcattgacaagttggatggtagaggtcacattgtcaaatgggctcctcaacaagaagtcttagctcaccaagctaccggtggtttctggactcactgtggttggaactccactttagaatccatgtgtgaaggtgtcccaatgatttgttcccacggtatcatggaccaaccaatcaatgctcgttacgttaccgatgtctggaaggttggtattgaattggaaaagggttttgactctgaagaaatcaagatggccatccgtcgtttgatggttgacaaggaaggtcaagaaatcagagaaagatcttccagattgaaggaatctttgtccaactgtttgaagcaaggtggttcttcccacgattctgtcgaatctttggttgaccacatcctatccttc

SEQ ID NO: 50 - protein, 464 aa, Lobelia erinus
MDNNHLGETLLPLAPKNGRRVLFFPYPLQGHISPMLNLANLLHSKGFTITIIHTNLNSPNQSDYPHFTFRPFDDGFPPYSKGWQLATLCSRCVEPFRECLAQIFLSDHTAPEGERESIACLIADGLWNFLGAAVYNFKLPMIVLRTGNMSNIVANVKLPCFIEKGYFDHTKEGSKLEAAVPEFPTIKFKDILKTYGSNPKAICETLTALLKEMRASSGVIWNSCKELEQSELQMICKEFPVPHFLIGPLHKYFPASSSSLVAHDPSSISWLNSKAPNSVLYVSFGSISSMDEAEFLETAWGLANSMQQFLWVVRPGSVRGSQWLESLPDGFIDKLDGRGHIVKWAPQQEVLAHQATGGFWTHCGWNSTLESMCEGVPMICSHGIMDQPINARYVTDVWKVGIELEKGFDSEEIKMAIRRLMVDKEGQEIRERSSRLKESLSNCLKQGGSSHDSVESLVDHILSF

SEQ ID NO: 51 - DNA, 1380 bp, Arabidopsis thaliana
  CDS (1)..(1380)
atggaagaaagaaagggtagaagaatcatcatgttcccattaccattcccaggtcacttcaacccaatgattgaattggctggtatctttcatcaccgtggtttctccgttaccatcttgcacacttcttacaacttcccagacccatccagacacccacacttcactttcagaaccatttctcacaacaaggaaggtgaagaagatccattatctcaatctgaaacctcttccatggacttgattgtcttggtcagaagattaaagcaacgttacgctgaaccattcagaaagtccgttgctgctgaagtcggtggtggtgaaaccgtttgttgtttggtttctgatgctatctggggtaagaacactgaagttgttgctgaagaaatcggtgtcagaagagttgttttgagaactggtggtgcctcttctttctgtgcctttgctgctttcccattattgagagacaagggttacttgccaatccaagattctcgtttggatgaacctgttactgaattgcctccattgaaggtcaaggacttaccagtcatggaaaccaatgaaccagaagaattgtacagagttgttaacgacatggttgaaggtgctaaatcttcttctggtgtcatctggaacactttcgaagatttggaaagattgtctttgatgaactgttcctccaaattgcaagttccattcttcccaatcggtccattccacaagtactctgaagatccaactccaaagactgaaaacaaggaagataccgactggttggacaagcaagaccctcaatccgttgtctacgcctcctttggttctttggccgctattgaagaaaaggaattcttggaaattgcttggggtctaagaaactctgaaagaccattcttatgggttgttagaccaggttccgtccgtggtactgaatggttggaatctctaccattgggtttcatggaaaacatcggtgacaagggtaagattgtcaaatgggctaaccaattggaagttttggctcacccagccattggtgctttctggacccactgtggttggaactccactttggaatccatctgtgaaggtgtcccaatgatctgtacctcctgttttaccgaccaacatgtcaacgccagatacattgtcgacgtctggagagtcggtatgttgttggaaagatccaagatggaaaagaaggaaatcgaaaaggttttgagatctgttatgatggaaaagggtgatggtttgagagaaagatctttgaaattgaaggaaagagctgatttctgtttgtccaaggacggttcttcttccaagtacttggacaaattggtttcccacgtcttatctttcgactcttacgctttcgcttct

SEQ ID NO: 52 - protein, 460 aa, Arabidopsis thaliana
MEERKGRRIIMFPLPFPGHFNPMIELAGIFHHRGFSVTILHTSYNFPDPSRHPHFTFRTISHNKEGEEDPLSQSETSSMDLIVLVRRLKQRYAEPFRKSVAAEVGGGETVCCLVSDAIWGKNTEVVAEEIGVRRVVLRTGGASSFCAFAAFPLLRDKGYLPIQDSRLDEPVTELPPLKVKDLPVMETNEPEELYRVVNDMVEGAKSSSGVIWNTFEDLERLSLMNCSSKLQVPFFPIGPFHKYSEDPTPKTENKEDTDWLDKQDPQSVVYASFGSLAAIEEKEFLEIAWGLRNSERPFLWVVRPGSVRGTEWLESLPLGFMENIGDKGKIVKWANQLEVLAHPAIGAFWTHCGWNSTLESICEGVPMICTSCFTDQHVNARYIVDVWRVGMLLERSKMEKKEIEKVLRSVMMEKGDGLRERSLKLKERADFCLSKDGSSSKYLDKLVSHVLSFDSYAFAS

SEQ ID NO: 53 - DNA, 2139 bp, Gibberella fujikuroi
  CDS (1)..(2139)
atggctgaattggacactttggatatcgtcgttttgggtgttatcttcttgggtactgttgcttacttcaccaagggtaagttgtggggtgtcaccaaggatccatacgctaacggttttgccgctggtggtgcttccaagccaggtagaaccagaaacattgttgaagccatggaagaatctggtaagaactgtgttgttttctacggttctcaaaccggtactgctgaagattacgcttccagattagctaaggaaggtaagtccagattcggtttgaacaccatgattgctgacttagaagattacgacttcgacaacttggataccgttccatctgacaacattgtcatgttcgttttggctacctacggtgaaggtgaacctaccgacaatgctgttgacttctacgaattcatcactggtgaagatgcttctttcaacgaaggtaacgaccctccattgggtaacttgaattatgtcgctttcggtttaggtaacaacacctacgaacactacaactccatggttagaaatgtcaacaaagctttggaaaagctaggtgcccacagaattggtgaagctggtgaaggtgacgacggtgctggtactatggaagaagatttcttggcttggaaggacccaatgtgggaagctttggctaagaagatgggtttggaagaaagagaagctgtttacgaaccaatctttgctatcaacgaaagagatgacttgactccagaagctaacgaagtttacttgggtgaaccaaataaattgcacttggaaggtactgctaagggtcctttcaactctcacaacccatacattgctccaattgctgaatcttacgaattgttctctgccaaggacagaaactgtttgcacatggaaattgatatctctggttccaacttgaaatacgaaactggtgaccacattgccatctggccaaccaacccaggtgaagaagtcaacaaattcttggatatcttggacttatccggtaagcaacactctgttgttaccgttaaggccttggaaccaactgccaaggtcccattcccaaacccaaccacttacgatgctatcctaagataccacttggaaatctgtgccccagtttcccgtcaatttgtctctactttggctgcctttgctccaaacgacgacatcaaggctgaaatgaacagattgggttctgacaaggactacttccatgaaaagactggtccacactactacaacattgccagattcttagcttccgtttctaagggtgaaaagtggaccaagattccattttccgctttcatcgaaggtttgaccaaattacaaccaagatactactccatctcctcttcttctttggtccaaccaaagaagatctccatcactgccgtcgttgaatctcaacaaattccaggtagagatgacccattcagaggtgtcgccaccaactacttgttcgctttgaagcaaaagcaaaacggtgacccaaacccagctccattcggtcaatcttacgaattgaccggtccaagaaacaaatacgatggtattcatgttccagtccacgtcagacactccaactttaaattgccttctgacccaggtaagccaatcatcatgatcggtccaggtactggtgttgctccattcagaggtttcgttcaagaaagagccaagcaagctagagatggtgtcgaagtcggtaagactttgttattcttcggttgtcgtaaatctactgaagatttcatgtaccaaaaggaatggcaagaatacaaagaagctttgggtgacaagttcgaaatgatcactgctttctccagagaaggttccaagaaggtttacgtccaacatcgtttgaaggaaagatccaaggaagtttccgacttgttgtctcaaaaggcctacttctacgtttgtggtgacgctgctcacatggctcgtgaagtcaacaccgtcttggctcaaatcattgctgaaggtagaggtgtctctgaagctaagggtgaagaaattgtcaagaacatgagatctgccaaccaataccaagtttgttctgatttcgttactttacactgtaaggaaaccacctacgctaactctgaattgcaagaagatgtctggtct

SEQ ID NO: 54 - protein, 713 aa, Gibberella fujikuroi
MAELDTLDIVVLGVIFLGTVAYFTKGKLWGVTKDPYANGFAAGGASKPGRTRNIVEAMEESGKNCVVFYGSQTGTAEDYASRLAKEGKSRFGLNTMIADLEDYDFDNLDTVPSDNIVMFVLATYGEGEPTDNAVDFYEFITGEDASFNEGNDPPLGNLNYVAFGLGNNTYEHYNSMVRNVNKALEKLGAHRIGEAGEGDDGAGTMEEDFLAWKDPMWEALAKKMGLEEREAVYEPIFAINERDDLTPEANEVYLGEPNKLHLEGTAKGPFNSHNPYIAPIAESYELFSAKDRNCLHMEIDISGSNLKYETGDHIAIWPTNPGEEVNKFLDILDLSGKQHSVVTVKALEPTAKVPFPNPTTYDAILRYHLEICAPVSRQFVSTLAAFAPNDDIKAEMNRLGSDKDYFHEKTGPHYYNIARFLASVSKGEKWTKIPFSAFIEGLTKLQPRYYSISSSSLVQPKKISITAVVESQQIPGRDDPFRGVATNYLFALKQKQNGDPNPAPFGQSYELTGPRNKYDGIHVPVHVRHSNFKLPSDPGKPIIMIGPGTGVAPFRGFVQERAKQARDGVEVGKTLLFFGCRKSTEDFMYQKEWQEYKEALGDKFEMITAFSREGSKKVYVQHRLKERSKEVSDLLSQKAYFYVCGDAAHMAREVNTVLAQIIAEGRGVSEAKGEEIVKNMRSANQYQVCSDFVTLHCKETTYANSELQEDVWS

SEQ ID NO: 55 - DNA, 2076 bp, Arabidopsis thaliana
  CDS (1)..(2076)
atgacctctgctttatacgcctccgatttgttcaagcaattgaagtccatcatgggtactgactctttgtccgatgatgttgtcttagtcattgccaccacttctttggctttggttgctggtttcgttgtcttgttgtggaagaaaaccaccgctgacagatccggtgaattgaaacctttgatgattccaaagtctttgatggccaaggacgaagatgacgacttggacttgggttctggtaagaccagagtctccattttcttcggtactcaaaccggtactgctgaaggtttcgctaaggctttgtctgaagaaattaaagccagatacgaaaaggctgccgttaaggttatcgatttggatgactacgctgctgacgatgaccaatacgaagaaaagttgaagaaggaaactttggctttcttctgtgttgctacctacggtgacggtgaaccaactgacaatgctgctagattctacaagtggttcaccgaagaaaacgaaagagacatcaaattgcaacaattggcttacggtgtctttgctttgggtaacagacaatacgaacatttcaacaagatcggtattgtcttggacgaagaattatgtaagaagggtgccaagagattgattgaagtcggtttgggtgacgatgaccaatctattgaagatgacttcaacgcttggaaggaatctttgtggtctgaattagacaagttattgaaggacgaagatgacaagtccgttgctactccatacactgctgtcatcccagaataccgtgtcgtcacccacgacccaagattcaccacccaaaagtccatggaatccaacgttgccaacggtaacaccactattgacatccaccacccatgtcgtgttgatgttgctgttcaaaaggaattgcacacccacgaatctgaccgttcttgtattcacttggaattcgatatctccagaaccggtatcacttacgaaactggtgaccacgtcggtgtctacgctgaaaaccacgttgaaatcgtcgaagaagccggtaaattgttgggtcactctttggacttggttttctccatccacgctgacaaggaagatggttctccattagaatccgccgtcccacctccattcccaggtccatgtaccttaggtactggtctagctcgttacgctgatttgttgaacccaccaagaaagtctgctttggttgctttggctgcttacgctactgaaccttctgaagctgaaaagttgaagcatttgacttctccagacggtaaggatgaatactcccaatggatcgttgcttctcaaagatctctattggaagttatggctgctttcccatctgccaagccaccattgggtgttttctttgctgccattgctccaagattgcaaccaagatactactccatttcttcttctccaagattggctccatctagagtccacgtcacctctgctttggtttacggtccaactccaaccggtagaatccacaaaggtgtttgttccacctggatgaagaacgctgttccagctgaaaagtcccacgaatgttccggtgctccaatctttatcagagcttctaacttcaagttgccatccaacccatctactccaatcgtcatggttggtccaggtactggtttggctccattcagaggtttcttacaagaaagaatggctttgaaagaagatggtgaagaattgggttcttctctattgttcttcggttgtagaaacagacaaatggacttcatctacgaagatgaattaaacaactttgtcgaccaaggtgttatctccgaattgatcatggccttctctagagaaggtgctcaaaaggaatacgttcaacataaaatgatggaaaaggctgctcaagtttgggacttgatcaaggaagaaggttacttgtacgtttgtggtgatgccaaaggtatggccagagatgtccacagaactttgcacaccattgtccaagaacaagaaggtgtttcctcttccgaagctgaagccattgtcaagaagttacaaactgaaggtcgttatttgagagatgtctgg

SEQ ID NO: 56 - protein, 692 aa, Arabidopsis thaliana [sequence omitted]

SEQ ID NO: 57 - DNA, 2133 bp, Arabidopsis thaliana
  CDS (1)..(2133)
atgtcctcttcttcttcttcttctacttccatgattgatttgatggctgccatcatcaagggtgaaccagtcattgtctctgacccagccaacgcttctgcttacgaatccgttgctgctgaattgtcctccatgttgattgaaaacagacaattcgctatgattgtcactacttccattgctgtcttgattggttgtatcgtcatgttggtctggagaagatccggttccggtaactccaagagagttgaaccattgaagccattagtcatcaagccaagagaagaagaaattgatgacggtagaaagaaggtcaccatcttctttggtactcaaaccggtactgctgaaggttttgctaaggctttgggtgaagaagccaaagctagatacgaaaagaccagattcaagatcgttgacttggacgactacgctgctgatgacgacgaatacgaagaaaagttgaagaaggaagatgttgccttcttcttcttggctacttacggtgatggtgaaccaactgacaatgctgccagattctacaaatggttcaccgaaggtaacgacagaggtgaatggttaaagaacttgaaatacggtgttttcggtctaggtaacagacaatacgaacacttcaacaaggttgccaaggttgtcgatgacatcttggttgaacaaggtgctcaaagattagtccaagtcggtttgggtgatgatgaccaatgtatcgaagatgacttcactgcttggagagaagctttgtggccagaattggacaccatcttaagagaagaaggtgataccgctgttgccaccccatacactgctgctgttttggaatacagagtttctatccacgactctgaagatgccaagttcaacgacatcaacatggctaacggtaacggttacactgttttcgacgctcaacacccatacaaggccaatgttgctgtcaagagagaattgcacactccagaatctgatcgttcttgtatccacttggaatttgacattgctggttctggtttgacctacgaaaccggtgaccacgtcggtgtcttatgtgacaacttgtctgaaactgtcgatgaagctttgagattattggacatgtctccagacacttatttctccttgcatgctgaaaaggaagatggtactccaatttcttcttccttgcctcctccattcccaccatgtaacttgagaaccgctttaaccagatacgcttgtttgctatcctctccaaagaagtccgctttggttgctttggctgctcacgcttctgacccaactgaagctgaaagattgaaacatttggcttccccagctggtaaggatgaatactccaaatgggttgttgaatctcaaagatctttgttggaagtcatggctgaattcccatctgccaagccaccattgggtgttttcttcgccggtgttgctccaagattgcaaccaagattttactccatctcttcttctccaaagattgctgaaaccagaattcacgttacctgtgccttggtctacgaaaagatgccaaccggtagaattcacaagggtgtttgttccacctggatgaagaacgctgttccatacgaaaagtctgaaaactgttcttctgctccaatcttcgtccgtcaatccaacttcaagttgccatctgactccaaggtcccaatcatcatgatcggtccaggtactggtttagctccattcagaggtttcttgcaagaaagattggccttagttgaatctggtgtcgaattgggtccttctgttttgttcttcggttgtagaaaccgtcgtatggacttcatctacgaagaagaattgcaaagatttgtcgaatctggtgctttggctgaattgtccgttgctttctctcgtgaaggtccaaccaaagaatacgttcaacacaagatgatggacaaagcctccgacatctggaacatgatctcccaaggtgcttacttgtacgtttgtggtgatgctaaaggtatggccagagatgtccacagatctttacataccattgcccaagaacaaggttccatggactccaccaaggctgaaggtttcgttaagaacttgcaaacttctggtcgttacttgagagatgtttgg

SEQ ID NO: 58 - protein, 711 aa, Arabidopsis thaliana
MSSSSSSSTSMIDLMAAIIKGEPVIVSDPANASAYESVAAELSSMLIENRQFAMIVTTSIAVLIGCIVMLVWRRSGSGNSKRVEPLKPLVIKPREEEIDDGRKKVTIFFGTQTGTAEGFAKALGEEAKARYEKTRFKIVDLDDYAADDDEYEEKLKKEDVAFFFLATYGDGEPTDNAARFYKWFTEGNDRGEWLKNLKYGVFGLGNRQYEHFNKVAKVVDDILVEQGAQRLVQVGLGDDDQCIEDDFTAWREALWPELDTILREEGDTAVATPYTAAVLEYRVSIHDSEDAKFNDINMANGNGYTVFDAQHPYKANVAVKRELHTPESDRSCIHLEFDIAGSGLTYETGDHVGVLCDNLSETVDEALRLLDMSPDTYFSLHAEKEDGTPISSSLPPPFPPCNLRTALTRYACLLSSPKKSALVALAAHASDPTEAERLKHLASPAGKDEYSKWVVESQRSLLEVMAEFPSAKPPLGVFFAGVAPRLQPRFYSISSSPKIAETRIHVTCALVYEKMPTGRIHKGVCSTWMKNAVPYEKSENCSSAPIFVRQSNFKLPSDSKVPIIMIGPGTGLAPFRGFLQERLALVESGVELGPSVLFFGCRNRRMDFIYEEELQRFVESGALAELSVAFSREGPTKEYVQHKMMDKASDIWNMISQGAYLYVCGDAKGMARDVHRSLHTIAQEQGSMDSTKAEGFVKNLQTSGRYLRDVW

SEQ ID NO: 59 - DNA, 2361 bp, Stevia rebaudiana
  CDS (1)..(2361)
atgaagactggtttcatctctccagctaccgtcttccaccacagaatctctccagctaccactttcagacaccacttgtccccagctaccactaactctactggtattgttgctttgagagacatcaacttcagatgtaaagctgtttccaaggaatactctgacttgttgcaaaaggatgaagcctccttcaccaaatgggatgatgacaaagttaaggaccatttagacactaacaagaacttgtacccaaacgatgaaatcaaggaattcgtcgaatctgtcaaagctatgttcggttccatgaatgatggtgaaatcaacgtttccgcttacgacaccgcttgggttgctttggttcaagacgttgatggttccggttctccacaattcccatcttctttggaatggattgccaacaaccaattgtctgatggttcttggggtgaccatttgttattctctgctcacgacagaattattaacactttagcttgtgtcattgctttgacttcctggaatgtccatccatccaagtgtgaaaagggtttgaacttcttgagagaaaacatctgtaagttggaagatgaaaatgctgaacacatgccaattggtttcgaagttaccttcccatctttgattgatatcgccaagaagttgaacatcgaagtcccagaagacaccccagctttgaaggaaatctacgccagaagagatatcaagttgaccaaaatcccaatggaagttttgcacaaggttccaaccaccttgttgcactctttggaaggtatgccagacttggaatgggaaaagttgttaaagttgcaatgtaaggacggttctttcttgttctctccatcttctaccgcctttgctttgatgcaaactaaggacgaaaagtgtctacaatacttaactaatatcgttaccaaattcaacggtggtgtcccaaacgtttaccctgttgacttgtttgaacacatctgggttgttgacagattgcaacgtttgggtattgctcgttatttcaagtctgaaatcaaggactgtgttgaatacatcaacaagtactggactaagaacggtatctgttgggctcgtaacacccacgttcaagatatcgacgacactgctatgggtttcagagtcttgagagctcatggttacgatgtcaccccagatgtcttcagacaattcgaaaaggatggtaagttcgtttgttttgccggtcaatccactcaagccgtcactggtatgttcaacgtctacagagcttctcaaatgttgttcccaggtgaaagaatcctagaagacgctaagaagttctcctacaactacttgaaagaaaagcaatctactaacgaattgttggacaaatggatcattgccaaagacttaccaggtgaagtcggttacgctttggatattccatggtacgcttctctaccaagattagaaaccagatactacttggaacaatacggtggtgaagacgatgtctggatcggtaagaccttgtacagaatgggttacgtttccaacaacacttacttggaaatggccaaattggactacaacaactacgtcgccgtcttacaattggaatggtacaccattcaacaatggtacgttgacattggtattgaaaagtttgaatccgacaacatcaagtccgtcttggtttcctactacttggctgctgcttccatctttgaaccagaaagatccaaggaaagaattgcttgggctaagaccaccatcttggttgacaagatcacttctattttcgactcttcccaatcttccaaggaagatatcaccgctttcattgacaaattcagaaacaagtcttcttccaagaagcactccattaacggtgaaccatggcacgaagttatggttgctttgaagaagactttgcacggttttgctttggatgctttgatgactcactctcaagatattcaccctcaattacaccaagcttgggaaatgtggttaaccaagttgcaagatggtgtcgatgtcactgctgaattgatggttcaaatgatcaacatgactgccggtagatgggtttctaaggaattgttgactcaccctcaataccaacgtttgtccaccgtcaccaactctgtctgtcacgacatcactaagttgcacaacttcaaagaaaactccactactgtcgattctaaggttcaagaattggttcaattagttttctctgacaccccagatgacttggaccaagacatgaagcaaactttcttgactgtcatgaagaccttctactacaaggcttggtgtgacccaaacaccatcaacgaccatatttctaaggtcttcgaaattgttatc

SEQ ID NO: 60 - protein, 787 aa, Stevia rebaudiana
MKTGFISPATVFHHRISPATTFRHHLSPATTNSTGIVALRDINFRCKAVSKEYSDLLQKDEASFTKWDDDKVKDHLDTNKNLYPNDEIKEFVESVKAMFGSMNDGEINVSAYDTAWVALVQDVDGSGSPQFPSSLEWIANNQLSDGSWGDHLLFSAHDRIINTLACVIALTSWNVHPSKCEKGLNFLRENICKLEDENAEHMPIGFEVTFPSLIDIAKKLNIEVPEDTPALKEIYARRDIKLTKIPMEVLHKVPTTLLHSLEGMPDLEWEKLLKLQCKDGSFLFSPSSTAFALMQTKDEKCLQYLTNIVTKFNGGVPNVYPVDLFEHIWVVDRLQRLGIARYFKSEIKDCVEYINKYWTKNGICWARNTHVQDIDDTAMGFRVLRAHGYDVTPDVFRQFEKDGKFVCFAGQSTQAVTGMFNVYRASQMLFPGERILEDAKKFSYNYLKEKQSTNELLDKWIIAKDLPGEVGYALDIPWYASLPRLETRYYLEQYGGEDDVWIGKTLYRMGYVSNNTYLEMAKLDYNNYVAVLQLEWYTIQQWYVDIGIEKFESDNIKSVLVSYYLAAASIFEPERSKERIAWAKTTILVDKITSIFDSSQSSKEDITAFIDKFRNKSSSKKHSINGEPWHEVMVALKKTLHGFALDALMTHSQDIHPQLHQAWEMWLTKLQDGVDVTAELMVQMINMTAGRWVSKELLTHPQYQRLSTVTNSVCHDITKLHNFKENSTTVDSKVQELVQLVFSDTPDDLDQDMKQTFLTVMKTFYYKAWCDPNTINDHISKVFEIVI

SEQ ID NO: 61 - DNA, 2229 bp, Stevia rebaudiana
  CDS (1)..(2229)
atgtgtaaagctgtttccaaggaatactctgacttgttgcaaaaggatgaagcctccttcaccaaatgggatgatgacaaagttaaggaccatttagacactaacaagaacttgtacccaaacgatgaaatcaaggaattcgtcgaatctgtcaaagctatgttcggttccatgaatgatggtgaaatcaacgtttccgcttacgacaccgcttgggttgctttggttcaagacgttgatggttccggttctccacaattcccatcttctttggaatggattgccaacaaccaattgtctgatggttcttggggtgaccatttgttattctctgctcacgacagaattattaacactttagcttgtgtcattgctttgacttcctggaatgtccatccatccaagtgtgaaaagggtttgaacttcttgagagaaaacatctgtaagttggaagatgaaaatgctgaacacatgccaattggtttcgaagttaccttcccatctttgattgatatcgccaagaagttgaacatcgaagtcccagaagacaccccagctttgaaggaaatctacgccagaagagatatcaagttgaccaaaatcccaatggaagttttgcacaaggttccaaccaccttgttgcactctttggaaggtatgccagacttggaatgggaaaagttgttaaagttgcaatgtaaggacggttctttcttgttctctccatcttctaccgcctttgctttgatgcaaactaaggacgaaaagtgtctacaatacttaactaatatcgttaccaaattcaacggtggtgtcccaaacgtttaccctgttgacttgtttgaacacatctgggttgttgacagattgcaacgtttgggtattgctcgttatttcaagtctgaaatcaaggactgtgttgaatacatcaacaagtactggactaagaacggtatctgttgggctcgtaacacccacgttcaagatatcgacgacactgctatgggtttcagagtcttgagagctcatggttacgatgtcaccccagatgtcttcagacaattcgaaaaggatggtaagttcgtttgttttgccggtcaatccactcaagccgtcactggtatgttcaacgtctacagagcttctcaaatgttgttcccaggtgaaagaatcctagaagacgctaagaagttctcctacaactacttgaaagaaaagcaatctactaacgaattgttggacaaatggatcattgccaaagacttaccaggtgaagtcggttacgctttggatattccatggtacgcttctctaccaagattagaaaccagatactacttggaacaatacggtggtgaagacgatgtctggatcggtaagaccttgtacagaatgggttacgtttccaacaacacttacttggaaatggccaaattggactacaacaactacgtcgccgtcttacaattggaatggtacaccattcaacaatggtacgttgacattggtattgaaaagtttgaatccgacaacatcaagtccgtcttggtttcctactacttggctgctgcttccatctttgaaccagaaagatccaaggaaagaattgcttgggctaagaccaccatcttggttgacaagatcacttctattttcgactcttcccaatcttccaaggaagatatcaccgctttcattgacaaattcagaaacaagtcttcttccaagaagcactccattaacggtgaaccatggcacgaagttatggttgctttgaagaagactttgcacggttttgctttggatgctttgatgactcactctcaagatattcaccctcaattacaccaagcttgggaaatgtggttaaccaagttgcaagatggtgtcgatgtcactgctgaattgatggttcaaatgatcaacatgactgccggtagatgggtttctaaggaattgttgactcaccctcaataccaacgtttgtccaccgtcaccaactctgtctgtcacgacatcactaagttgcacaacttcaaagaaaactccactactgtcgattctaaggttcaagaattggttcaattagttttctctgacaccccagatgacttggaccaagacatgaagcaaactttcttgactgtcatgaagaccttctactacaaggcttggtgtgacccaaacaccatcaacgaccatatttctaaggtcttcgaaattgttatc

SEQ ID NO: 62 - protein, 743 aa, Stevia rebaudiana
MCKAVSKEYSDLLQKDEASFTKWDDDKVKDHLDTNKNLYPNDEIKEFVESVKAMFGSMNDGEINVSAYDTAWVALVQDVDGSGSPQFPSSLEWIANNQLSDGSWGDHLLFSAHDRIINTLACVIALTSWNVHPSKCEKGLNFLRENICKLEDENAEHMPIGFEVTFPSLIDIAKKLNIEVPEDTPALKEIYARRDIKLTKIPMEVLHKVPTTLLHSLEGMPDLEWEKLLKLQCKDGSFLFSPSSTAFALMQTKDEKCLQYLTNIVTKFNGGVPNVYPVDLFEHIWVVDRLQRLGIARYFKSEIKDCVEYINKYWTKNGICWARNTHVQDIDDTAMGFRVLRAHGYDVTPDVFRQFEKDGKFVCFAGQSTQAVTGMFNVYRASQMLFPGERILEDAKKFSYNYLKEKQSTNELLDKWIIAKDLPGEVGYALDIPWYASLPRLETRYYLEQYGGEDDVWIGKTLYRMGYVSNNTYLEMAKLDYNNYVAVLQLEWYTIQQWYVDIGIEKFESDNIKSVLVSYYLAAASIFEPERSKERIAWAKTTILVDKITSIFDSSQSSKEDITAFIDKFRNKSSSKKHSINGEPWHEVMVALKKTLHGFALDALMTHSQDIHPQLHQAWEMWLTKLQDGVDVTAELMVQMINMTAGRWVSKELLTHPQYQRLSTVTNSVCHDITKLHNFKENSTTVDSKVQELVQLVFSDTPDDLDQDMKQTFLTVMKTFYYKAWCDPNTINDHISKVFEIVI

SEQ ID NO: 63 - DNA, 2352 bp, Stevia rebaudiana
  CDS (1)..(2352)
atgaacttgtctctatgtattgcttctccattattgaccaaatctaacagaccagccgctctatccgctattcacactgcctccacttctcacggtggtcaaaccaacccaaccaacttgattattgacaccaccaaggaaagaatccaaaagcaattcaagaatgttgaaatctccgtttcctcctacgacactgcttgggttgccatggttccatctccaaactccccaaagtctccatgtttcccagaatgtttgaactggttaatcaacaaccaattgaacgatggttcctggggtttagtcaatcacacccacaaccacaatcacccattgttgaaggactctctatcctccactttggcttgtatcgttgctttgaagagatggaacgttggtgaagaccaaatcaacaagggtttgtcctttattgaatccaacttggcttctgctactgaaaagtcccaaccatctcctatcggttttgacatcattttcccaggtttattggaatacgctaagaacttggacatcaacttattatctaagcaaaccgatttctccttgatgttgcacaagagagaattggaacaaaagagatgtcactccaacgaaatggacggttacttggcttacatttctgaaggtttgggtaacttgtacgactggaacatggtcaagaaataccaaatgaagaacggttccgttttcaactctccatctgctaccgctgctgctttcatcaaccatcaaaacccaggttgtttgaactacttgaactctttgttggacaaattcggtaacgctgttccaactgtctacccacacgatttgtttatcagattatccatggttgacaccattgaacgtttgggtatttctcatcacttcagagtcgaaatcaagaacgttttggatgaaacttacagatgttgggttgaaagagatgaacaaatcttcatggatgtcgtcacttgtgccttggccttcagattattgagaattaacggttacgaagtttctccagacccattggctgaaatcactaacgaattggctttgaaggacgaatacgccgctttggaaacttaccatgcctctcacatcttataccaagaagacttgtcctctggtaagcaaatcttgaagtctgctgacttcttgaaggaaattatctctactgattctaacagattgtccaagttgattcacaaggaagttgaaaacgccttgaaattcccaatcaacactggtttggaaagaattaacaccagaagaaacatccaattatacaacgttgacaacactagaatcttgaagactacttatcactcttccaacatctccaacactgactacttgagattggctgtcgaagatttctacacctgtcaatctatttacagagaagaattgaagggtttggaaagatgggttgtcgaaaacaaattggaccaattgaaatttgctagacaaaagaccgcctactgttacttctccgttgctgccactttgtcctctccagaattatctgacgccagaatctcctgggctaagaatggtatcttgaccaccgttgtcgatgacttcttcgatattggtggtaccattgacgaattgaccaacttgattcaatgtgttgaaaagtggaacgtcgatgtcgataaggactgttgttctgaacacgtcagaatcttattcttggctttgaaagatgctatctgttggatcggtgacgaagctttcaaatggcaagctcgtgacgttacctctcacgtcatccaaacctggttggaattgatgaactctatgttgagagaagccatctggacccgtgatgcttacgtcccaactttgaacgaatacatggaaaatgcttacgtttctttcgctttgggtccaattgtcaagcctgctatttacttcgttggtccaaagttgtccgaagaaattgttgaatcttctgaataccacaacttgttcaaattgatgtctactcaaggtcgtttgttgaacgatatccactctttcaagcgtgaattcaaggaaggtaagttgaatgctgttgctttgcatttgtctaacggtgaatctggtaaggtcgaagaagaagttgtcgaagaaatgatgatgatgatcaagaacaagagaaaggaattgatgaagttgatctttgaagaaaacggttctattgtcccaagagcttgtaaggatgctttctggaacatgtgtcacgtcttgaacttcttctacgctaacgatgacggtttcactggtaacaccatcttagacaccgtcaaggacatcatttacaacccattagtcttggttaacgaaaacgaagaacaaaga

SEQ ID NO: 64 - protein, 784 aa, Stevia rebaudiana
MNLSLCIASPLLTKSNRPAALSAIHTASTSHGGQTNPTNLIIDTTKERIQKQFKNVEISVSSYDTAWVAMVPSPNSPKSPCFPECLNWLINNQLNDGSWGLVNHTHNHNHPLLKDSLSSTLACIVALKRWNVGEDQINKGLSFIESNLASATEKSQPSPIGFDIIFPGLLEYAKNLDINLLSKQTDFSLMLHKRELEQKRCHSNEMDGYLAYISEGLGNLYDWNMVKKYQMKNGSVFNSPSATAAAFINHQNPGCLNYLNSLLDKFGNAVPTVYPHDLFIRLSMVDTIERLGISHHFRVEIKNVLDETYRCWVERDEQIFMDVVTCALAFRLLRINGYEVSPDPLAEITNELALKDEYAALETYHASHILYQEDLSSGKQILKSADFLKEIISTDSNRLSKLIHKEVENALKFPINTGLERINTRRNIQLYNVDNTRILKTTYHSSNISNTDYLRLAVEDFYTCQSIYREELKGLERWVVENKLDQLKFARQKTAYCYFSVAATLSSPELSDARISWAKNGILTTVVDDFFDIGGTIDELTNLIQCVEKWNVDVDKDCCSEHVRILFLALKDAICWIGDEAFKWQARDVTSHVIQTWLELMNSMLREAIWTRDAYVPTLNEYMENAYVSFALGPIVKPAIYFVGPKLSEEIVESSEYHNLFKLMSTQGRLLNDIHSFKREFKEGKLNAVALHLSNGESGKVEEEVVEEMMMMIKNKRKELMKLIFEENGSIVPRACKDAFWNMCHVLNFFYANDDGFTGNTILDTVKDIIYNPLVLVNENEEQR

SEQ ID NO: 65 - DNA, 2271 bp, Stevia rebaudiana
  CDS (1)..(2271)
atgacttctcacggtggtcaaaccaacccaaccaacttgattattgacaccaccaaggaaagaatccaaaagcaattcaagaatgttgaaatctccgtttcctcctacgacactgcttgggttgccatggttccatctccaaactccccaaagtctccatgtttcccagaatgtttgaactggttaatcaacaaccaattgaacgatggttcctggggtttagtcaatcacacccacaaccacaatcacccattgttgaaggactctctatcctccactttggcttgtatcgttgctttgaagagatggaacgttggtgaagaccaaatcaacaagggtttgtcctttattgaatccaacttggcttctgctactgaaaagtcccaaccatctcctatcggttttgacatcattttcccaggtttattggaatacgctaagaacttggacatcaacttattatctaagcaaaccgatttctccttgatgttgcacaagagagaattggaacaaaagagatgtcactccaacgaaatggacggttacttggcttacatttctgaaggtttgggtaacttgtacgactggaacatggtcaagaaataccaaatgaagaacggttccgttttcaactctccatctgctaccgctgctgctttcatcaaccatcaaaacccaggttgtttgaactacttgaactctttgttggacaaattcggtaacgctgttccaactgtctacccacacgatttgtttatcagattatccatggttgacaccattgaacgtttgggtatttctcatcacttcagagtcgaaatcaagaacgttttggatgaaacttacagatgttgggttgaaagagatgaacaaatcttcatggatgtcgtcacttgtgccttggccttcagattattgagaattaacggttacgaagtttctccagacccattggctgaaatcactaacgaattggctttgaaggacgaatacgccgctttggaaacttaccatgcctctcacatcttataccaagaagacttgtcctctggtaagcaaatcttgaagtctgctgacttcttgaaggaaattatctctactgattctaacagattgtccaagttgattcacaaggaagttgaaaacgccttgaaattcccaatcaacactggtttggaaagaattaacaccagaagaaacatccaattatacaacgttgacaacactagaatcttgaagactacttatcactcttccaacatctccaacactgactacttgagattggctgtcgaagatttctacacctgtcaatctatttacagagaagaattgaagggtttggaaagatgggttgtcgaaaacaaattggaccaattgaaatttgctagacaaaagaccgcctactgttacttctccgttgctgccactttgtcctctccagaattatctgacgccagaatctcctgggctaagaatggtatcttgaccaccgttgtcgatgacttcttcgatattggtggtaccattgacgaattgaccaacttgattcaatgtgttgaaaagtggaacgtcgatgtcgataaggactgttgttctgaacacgtcagaatcttattcttggctttgaaagatgctatctgttggatcggtgacgaagctttcaaatggcaagctcgtgacgttacctctcacgtcatccaaacctggttggaattgatgaactctatgttgagagaagccatctggacccgtgatgcttacgtcccaactttgaacgaatacatggaaaatgcttacgtttctttcgctttgggtccaattgtcaagcctgctatttacttcgttggtccaaagttgtccgaagaaattgttgaatcttctgaataccacaacttgttcaaattgatgtctactcaaggtcgtttgttgaacgatatccactctttcaagcgtgaattcaaggaaggtaagttgaatgctgttgctttgcatttgtctaacggtgaatctggtaaggtcgaagaagaagttgtcgaagaaatgatgatgatgatcaagaacaagagaaaggaattgatgaagttgatctttgaagaaaacggttctattgtcccaagagcttgtaaggatgctttctggaacatgtgtcacgtcttgaacttcttctacgctaacgatgacggtttcactggtaacaccatcttagacaccgtcaaggacatcatttacaacccattagtcttggttaacgaaaacgaagaacaaaga

SEQ ID NO: 66 - protein, 757 aa, Stevia rebaudiana
MTSHGGQTNPTNLIIDTTKERIQKQFKNVEISVSSYDTAWVAMVPSPNSPKSPCFPECLNWLINNQLNDGSWGLVNHTHNHNHPLLKDSLSSTLACIVALKRWNVGEDQINKGLSFIESNLASATEKSQPSPIGFDIIFPGLLEYAKNLDINLLSKQTDFSLMLHKRELEQKRCHSNEMDGYLAYISEGLGNLYDWNMVKKYQMKNGSVFNSPSATAAAFINHQNPGCLNYLNSLLDKFGNAVPTVYPHDLFIRLSMVDTIERLGISHHFRVEIKNVLDETYRCWVERDEQIFMDVVTCALAFRLLRINGYEVSPDPLAEITNELALKDEYAALETYHASHILYQEDLSSGKQILKSADFLKEIISTDSNRLSKLIHKEVENALKFPINTGLERINTRRNIQLYNVDNTRILKTTYHSSNISNTDYLRLAVEDFYTCQSIYREELKGLERWVVENKLDQLKFARQKTAYCYFSVAATLSSPELSDARISWAKNGILTTVVDDFFDIGGTIDELTNLIQCVEKWNVDVDKDCCSEHVRILFLALKDAICWIGDEAFKWQARDVTSHVIQTWLELMNSMLREAIWTRDAYVPTLNEYMENAYVSFALGPIVKPAIYFVGPKLSEEIVESSEYHNLFKLMSTQGRLLNDIHSFKREFKEGKLNAVALHLSNGESGKVEEEVVEEMMMMIKNKRKELMKLIFEENGSIVPRACKDAFWNMCHVLNFFYANDDGFTGNTILDTVKDIIYNPLVLVNENEEQR

SEQ ID NO: 67 - DNA, 1539 bp, Stevia rebaudiana
  CDS (1)..(1539)
atggatgctgtcactggtttgttgaccgtcccagctaccgccatcaccattggtggtactgctgttgctttggctgttgctttgatcttctggtacttgaaatcttacacttctgccagaagatctcaatctaaccatttaccaagagttccagaagttccaggtgttccattgttgggtaacttgttgcaattgaaagaaaagaagccttacatgactttcaccagatgggctgctacctacggtccaatttactctatcaagaccggtgctacctccatggttgttgtttcctccaacgaaattgccaaggaagctttagtcaccagattccaatccatctctaccagaaacttgtccaaggctttgaaggtcttgactgctgacaagaccatggttgccatgtctgactacgatgactaccacaagactgtcaaacgtcacatcttgactgctgttttgggtccaaatgctcaaaagaagcacagaattcacagagatatcatgatggacaacatctctactcaattgcatgaatttgtcaagaacaacccagaacaagaagaagtcgatttgagaaagatcttccaatctgaattgttcggtttggccatgagacaagctttgggtaaagatgtcgaatctttatacgtcgaagatttgaagatcaccatgaacagagatgaaatcttccaagttttggttgtcgacccaatgatgggtgccattgatgttgactggagagatttcttcccatacttgaaatgggttccaaacaagaagttcgaaaataccattcaacaaatgtacatccgtcgtgaagctgtcatgaagtctttaatcaaggaaaacaagaagagaattgcttctggtgaaaagttaaactcctacattgactatttgttgtccgaagctcaaactttgactgaccaacaattattgatgtctttatgggaaccaatcattgaatcttctgacaccaccatggtcactactgaatgggctatgtacgaattggccaagaacccaaaattacaagaccgtttgtacagagatatcaaatccgtctgtggttccgaaaagatcactgaagaacacttgtctcaattgccatacatcactgctatcttccacgaaactttgagaagacactctccagttccaatcattccattgagacacgtccacgaagacactgttttgggtggttaccacgttccagctggtactgaattggctgtcaacatctacggttgtaacatggacaagaacgtctgggaaaacccagaagaatggaacccagaaagattcatgaaggaaaacgaaaccattgacttccaaaagaccatggctttcggtggtggtaagagagtttgtgccggttccttgcaagctctattgaccgcttccattggtattggtagaatggttcaagaatttgaatggaagttgaaggacatgacccaagaagaagttaacaccattggtttgactactcaaatgttaagaccattgagagccatcatcaagcctcgcatc

SEQ ID NO: 68 - protein, 513 aa, Stevia rebaudiana
MDAVTGLLTVPATAITIGGTAVALAVALIFWYLKSYTSARRSQSNHLPRVPEVPGVPLLGNLLQLKEKKPYMTFTRWAATYGPIYSIKTGATSMVVVSSNEIAKEALVTRFQSISTRNLSKALKVLTADKTMVAMSDYDDYHKTVKRHILTAVLGPNAQKKHRIHRDIMMDNISTQLHEFVKNNPEQEEVDLRKIFQSELFGLAMRQALGKDVESLYVEDLKITMNRDEIFQVLVVDPMMGAIDVDWRDFFPYLKWVPNKKFENTIQQMYIRREAVMKSLIKENKKRIASGEKLNSYIDYLLSEAQTLTDQQLLMSLWEPIIESSDTTMVTTEWAMYELAKNPKLQDRLYRDIKSVCGSEKITEEHLSQLPYITAIFHETLRRHSPVPIIPLRHVHEDTVLGGYHVPAGTELAVNIYGCNMDKNVWENPEEWNPERFMKENETIDFQKTMAFGGGKRVCAGSLQALLTASIGIGRMVQEFEWKLKDMTQEEVNTIGLTTQMLRPLRAIIKPRI

SEQ ID NO: 69 - DNA, 1566 bp, Stevia rebaudiana
  CDS (1)..(1566)
atgggtttgttcccattggaagactcttacgctttggttttcgaaggtttggccatcactttggctttgtactacctattgtctttcatctacaagacctccaagaagacctgtaccccaccaaaggcttctggtgaacacccaattaccggtcatttaaacttgttgtctggttcttccggtttgccacacttggctttggcttctttggctgacagatgtggtcctatcttcaccatcagattaggtatcagaagagttttggttgtttccaactgggaaattgccaaggaaatctttaccacccacgacttgattgtctccaacagaccaaagtacttggctgccaagatcttaggtttcaactacgtttctttctctttcgctccatacggtccatactgggttggtatcagaaagattattgctactaaattgatgtcttcttctagattgcaaaagttgcaattcgtccgtgtctttgaattggaaaactccatgaaatccatcagagaatcctggaaggaaaagaaggatgaagaaggtaaggtcttggttgaaatgaagaagtggttctgggaattgaatatgaacattgtcttgagaaccgttgctggtaagcaatacactggtactgttgacgatgctgatgccaagagaatttctgaattgttcagagaatggttccactacactggtagattcgttgtcggtgatgctttcccatttctaggttggttggatttaggtggttacaagaagaccatggaattggttgcctccagattagattccatggtcagcaaatggttggacgaacacagaaagaagcaagctaacgatgacaagaaggaagacatggacttcatggacatcatgatctccatgactgaagctaactctccattggaaggttacggtactgacaccatcatcaagaccacttgtatgactttgattgtttccggtgtcgacaccacttctatcgttttgacctgggctttgtctttgttgttgaacaacagagacactttaaagaaggctcaagaagaattggacatgtgtgtcggtaagggtagacaagtcaatgaatctgatttggtcaacttaatctatttagaagctgtcttgaaagaagctttgagattgtacccagctgctttcttgggtggtcctcgtgctttcttggaagactgtaccgttgccggttacagaattccaaagggtacttgtttgttgatcaacatgtggaaattgcacagagatccaaacatctggtctgacccatgtgaattcaaaccagaaagattcttgactccaaaccaaaaggatgttgatgtcattggtatggacttcgaattgattccattcggtgctggtcgtcgttactgtccaggtaccagattagctttgcaaatgttgcacattgtcttggccactctattacaaaactttgaaatgtccactccaaacgatgctccagttgacatgactgcttccgttggtatgaccaacgccaaggcttctccattggaagttttgttgtctccaagagtcaaatggtct

SEQ ID NO: 70 - protein, 522 aa, Stevia rebaudiana
MGLFPLEDSYALVFEGLAITLALYYLLSFIYKTSKKTCTPPKASGEHPITGHLNLLSGSSGLPHLALASLADRCGPIFTIRLGIRRVLVVSNWEIAKEIFTTHDLIVSNRPKYLAAKILGFNYVSFSFAPYGPYWVGIRKIIATKLMSSSRLQKLQFVRVFELENSMKSIRESWKEKKDEEGKVLVEMKKWFWELNMNIVLRTVAGKQYTGTVDDADAKRISELFREWFHYTGRFVVGDAFPFLGWLDLGGYKKTMELVASRLDSMVSKWLDEHRKKQANDDKKEDMDFMDIMISMTEANSPLEGYGTDTIIKTTCMTLIVSGVDTTSIVLTWALSLLLNNRDTLKKAQEELDMCVGKGRQVNESDLVNLIYLEAVLKEALRLYPAAFLGGPRAFLEDCTVAGYRIPKGTCLLINMWKLHRDPNIWSDPCEFKPERFLTPNQKDVDVIGMDFELIPFGAGRRYCPGTRLALQMLHIVLATLLQNFEMSTPNDAPVDMTASVGMTNAKASPLEVLLSPRVKWS

SEQ ID NO: 71 - DNA, 1443 bp, Stevia rebaudiana
  CDS (1)..(1443)
atggacgctatggccaccactgaaaagaagcctcacgttatctttattccattcccagctcaatctcatatcaaggctatgttgaaattggctcaattattgcaccacaagggtttgcaaatcacttttgtcaacaccgacttcattcacaaccaattcttggaatcttctggtcctcactgtttggacggtgctccaggtttcagattcgaaaccattccagatggtgtttcccactctccagaagcctccatcccaatcagagaatccttgttgagatctattgaaaccaacttcttggaccgtttcatcgatttggttaccaaattgccagacccaccaacctgtatcatttctgacggtttcttgtccgttttcaccatcgatgctgccaagaaattgggtattccagtcatgatgtactggactttggctgcttgtggtttcatgggtttctaccatattcactctttgattgaaaagggtttcgctccattaaaggatgcttcttacttgaccaacggttacttggacaccgtcattgactgggttccaggtatggaaggtatcagattgaaagatttcccattggactggtctactgacttgaatgacaaggtcttgatgttcactactgaagctccacaaagatctcataaggtttctcaccacatcttccacactttcgatgaattagaaccatctatcatcaagactctatccttgagatacaaccatatctacaccattggtccattacaattgttgttggaccaaatcccagaagaaaagaagcaaaccggtatcacttctttgcacggttactctttagtcaaggaagaaccagaatgtttccaatggttacaatccaaggaaccaaactctgttgtctacgttaactttggttccaccactgttatgtccttggaagatatgactgaatttggttggggtttggctaactctaaccactacttcttatggatcatcagatctaacttggtcattggtgaaaacgccgttttgcctccagaattggaagaacacatcaagaagagaggtttcattgcttcctggtgttctcaagaaaaggtcttgaagcacccatctgttggtggtttcttgacccactgtggttggggttccaccattgaatccctatctgctggtgttccaatgatctgttggccatactcctgggaccaattgactaactgtcgttacatctgtaaggaatgggaagttggtttggaaatgggtactaaggtcaagagagatgaagtcaagagattagtccaagaattgatgggtgaaggtggtcacaagatgagaaacaaagccaaggactggaaggaaaaggccagaattgctattgctccaaacggttcttcctccttgaacatcgataaaatggttaaggaaatcactgtcttggctcgaaac

SEQ ID NO: 72 - protein, 481 aa, Stevia rebaudiana
MDAMATTEKKPHVIFIPFPAQSHIKAMLKLAQLLHHKGLQITFVNTDFIHNQFLESSGPHCLDGAPGFRFETIPDGVSHSPEASIPIRESLLRSIETNFLDRFIDLVTKLPDPPTCIISDGFLSVFTIDAAKKLGIPVMMYWTLAACGFMGFYHIHSLIEKGFAPLKDASYLTNGYLDTVIDWVPGMEGIRLKDFPLDWSTDLNDKVLMFTTEAPQRSHKVSHHIFHTFDELEPSIIKTLSLRYNHIYTIGPLQLLLDQIPEEKKQTGITSLHGYSLVKEEPECFQWLQSKEPNSVVYVNFGSTTVMSLEDMTEFGWGLANSNHYFLWIIRSNLVIGENAVLPPELEEHIKKRGFIASWCSQEKVLKHPSVGGFLTHCGWGSTIESLSAGVPMICWPYSWDQLTNCRYICKEWEVGLEMGTKVKRDEVKRLVQELMGEGGHKMRNKAKDWKEKARIAIAPNGSSSLNIDKMVKEITVLARN

SEQ ID NO: 73 - DNA, 1380 bp, Stevia rebaudiana
  CDS (1)..(1380)
atggctgaacaacaaaagatcaagaaatctccacacgtcttgttgattccattcccattgcaaggtcacatcaacccattcatccaattcggtaagagattgatttccaagggtgtcaagaccactttagtcaccactattcacactttaaactccactttaaaccactctaacactactaccacctctattgaaatccaagccatttctgacggttgtgacgaaggtggtttcatgtctgctggtgaatcttacttggaaactttcaagcaagtcggttccaagtctttggctgatttgatcaagaaattgcaatccgaaggtactaccatcgatgctatcatctacgactccatgactgaatgggttttggatgttgccattgaatttggtattgacggtggttctttcttcacccaagcctgtgttgttaactctttgtactaccacgtccacaagggtttgatctctctaccattaggtgaaaccgtttccgtcccaggtttcccagtcttgcaaagatgggaaactccattgatcttacaaaaccatgaacaaatccaatctccatggtcccaaatgttgtttggtcaattcgctaacattgaccaagctagatgggttttcaccaactctttctacaagttggaagaagaagtcattgaatggaccagaaagatctggaacttgaaggttatcggtccaactctaccatccatgtacttggacaagagattggatgacgacaaggacaacggtttcaacttgtacaaggctaaccatcacgaatgtatgaactggttggatgacaagccaaaggaatctgttgtttacgttgctttcggttctttggtcaagcatggtccagaacaagttgaagaaatcaccagagctttgattgactccgatgttaacttcttatgggttatcaagcacaaggaagaaggtaaattgccagaaaacttgtctgaagttatcaagaccggtaagggtttgattgttgcttggtgtaagcaattggatgttttggctcacgaatccgtcggttgtttcgtcactcactgtggtttcaactctactttggaagctatctccttgggtgttccagttgttgccatgcctcaattctctgaccaaaccaccaacgccaaattgttggatgaaatcttgggtgtcggtgtccgtgtcaaggctgatgaaaacggtattgttagaagaggtaacttagcttcctgtatcaagatgatcatggaagaagaacgtggtgtcattatcagaaagaatgctgtcaaatggaaggacttggctaaggttgctgtccacgaaggtggttcctctgacaatgacattgttgaatttgtctctgaattgatcaaagcg

SEQ ID NO: 74 - protein, 460 aa, Stevia rebaudiana
MAEQQKIKKSPHVLLIPFPLQGHINPFIQFGKRLISKGVKTTLVTTIHTLNSTLNHSNTTTTSIEIQAISDGCDEGGFMSAGESYLETFKQVGSKSLADLIKKLQSEGTTIDAIIYDSMTEWVLDVAIEFGIDGGSFFTQACVVNSLYYHVHKGLISLPLGETVSVPGFPVLQRWETPLILQNHEQIQSPWSQMLFGQFANIDQARWVFTNSFYKLEEEVIEWTRKIWNLKVIGPTLPSMYLDKRLDDDKDNGFNLYKANHHECMNWLDDKPKESVVYVAFGSLVKHGPEQVEEITRALIDSDVNFLWVIKHKEEGKLPENLSEVIKTGKGLIVAWCKQLDVLAHESVGCFVTHCGFNSTLEAISLGVPVVAMPQFSDQTTNAKLLDEILGVGVRVKADENGIVRRGNLASCIKMIMEEERGVIIRKNAVKWKDLAKVAVHEGGSSDNDIVEFVSELIKA

SEQ ID NO: 75 - DNA, 1374 bp, Stevia rebaudiana
  CDS (1)..(1374)
atggaaaacaagactgaaaccactgttagaagaagaagaagaatcatcttattcccagttccattccaaggtcacattaacccaatcttgcaattggctaacgtcttatactccaagggtttctccatcaccatcttccacaccaacttcaacaaacctaaaacttccaactacccacacttcaccttcagatttatcttggacaacgacccacaagatgaaagaatttctaacttgccaacccatggtccattggccggtatgagaattccaatcatcaacgaacacggtgctgacgaattgagaagagaattggaattgttgatgttggcttctgaagaagatgaagaagtctcttgtttgatcactgatgctttatggtactttgctcaatctgttgctgactctttgaacttgagaagattagtcttgatgacctcttctttgttcaacttccacgctcacgtttctctaccacaatttgatgaattgggttacttggacccagatgacaagaccagattggaagaacaagcctccggtttcccaatgttgaaggtcaaggatatcaagtctgcctactccaactggcaaatcttgaaggaaattttgggtaagatgatcaagcaaaccaaggcttcttctggtgtcatctggaactccttcaaggaattggaagaatctgaattggaaaccgtcatcagagaaattccagctccatctttcttgattccattaccaaagcatttgactgcttcctcctcttctctattggaccacgacagaactgttttccaatggttggaccaacaaccaccatcttccgtcttatacgtttcctttggttccacttctgaagttgacgaaaaggacttcttggaaattgctcgtggtttggttgactccaagcaatctttcttatgggttgtcagaccaggtttcgtcaagggttccacctgggttgaacctttgccagacggtttcttgggtgaaagaggtagaattgtcaaatgggttccacaacaagaagttttggctcacggtgccattggtgctttctggactcactctggttggaactctactttggaatccgtttgtgaaggtgttccaatgattttctctgacttcggtttggaccaaccattgaatgctcgttacatgtccgatgttttgaaggttggtgtctacttggaaaacggttgggaacgtggtgaaattgctaacgccatcagaagagtcatggtcgatgaagaaggtgaatacatcagacaaaatgctcgtgtcttgaaacaaaaggctgatgtttctttgatgaagggtggttcttcttacgaatctttggaatctttggtttcctacatctccagtctc

SEQ ID NO: 76 - protein, 458 aa, Stevia rebaudiana
MENKTETTVRRRRRIILFPVPFQGHINPILQLANVLYSKGFSITIFHTNFNKPKTSNYPHFTFRFILDNDPQDERISNLPTHGPLAGMRIPIINEHGADELRRELELLMLASEEDEEVSCLITDALWYFAQSVADSLNLRRLVLMTSSLFNFHAHVSLPQFDELGYLDPDDKTRLEEQASGFPMLKVKDIKSAYSNWQILKEILGKMIKQTKASSGVIWNSFKELEESELETVIREIPAPSFLIPLPKHLTASSSSLLDHDRTVFQWLDQQPPSSVLYVSFGSTSEVDEKDFLEIARGLVDSKQSFLWVVRPGFVKGSTWVEPLPDGFLGERGRIVKWVPQQEVLAHGAIGAFWTHSGWNSTLESVCEGVPMIFSDFGLDQPLNARYMSDVLKVGVYLENGWERGEIANAIRRVMVDEEGEYIRQNARVLKQKADVSLMKGGSSYESLESLVSYISSL

SEQ ID NO: 77 - DNA, 2130 bp, Stevia rebaudiana
  CDS (1)..(2130)
atgcaatctgattccgttaaggtttctccattcgacttagtctctgctgccatgaacggtaaggctatggaaaagttgaacgcttctgaatctgaggacccaactactttaccagctttaaagatgttggttgaaaacagagaattgttgactttattcaccacctcctttgctgtcttgattggttgtttggttttcttgatgtggagaagatcttcttctaagaagttggttcaagacccagttcctcaagtcatcgtcgtcaagaagaaggaaaaggaatctgaagtcgatgacggtaagaagaaagtttccatcttctacggtactcaaaccggtactgctgaaggtttcgctaaagctttagttgaagaagctaaggtcagatacgaaaagacctctttcaaggttatcgatttggacgactacgccgctgacgacgacgaatacgaagaaaagttgaagaaggaatctctagctttcttcttcttggctacctacggtgacggtgaaccaaccgacaatgctgccaacttctacaaatggttcaccgaaggtgatgacaagggtgaatggttgaagaaattgcaatacggtgttttcggtttaggtaacagacaatacgaacacttcaacaagattgccatcgtcgttgatgacaaattgactgaaatgggtgccaagagattggttccagtcggtttgggtgatgatgaccaatgtattgaagatgactttaccgcttggaaggaattagtttggccagaattagaccaattgttgagagatgaagatgacacctctgttaccaccccatacaccgccgctgtcttggaataccgtgtcgtttaccatgacaaaccagctgactcttacgctgaagatcaaacccacaccaacggtcacgttgtccacgacgctcaacacccatccagatctaacgttgctttcaagaaggaattgcacacttcccaatctgatcgttcttgtacccacttggaatttgacatctcccacaccggtttgtcttacgaaaccggtgaccatgttggtgtctactctgaaaacttgtctgaagttgtcgacgaagctttgaaattgttgggtttgtctccagacacttacttctccgtccacgctgacaaagaagatggtactccaatcggtggtgcttctttgcctccaccattcccaccatgtactctaagagatgctttgacccgttatgctgacgttctatcctctccaaagaaggttgctttgttggctttggctgctcatgcttctgatccatctgaagctgacagattgaagttcttggcttccccagccggtaaggacgaatacgctcaatggattgttgccaaccaaagatccttgttggaagtcatgcaatctttcccatctgccaagcctccattgggtgttttctttgccgctgttgccccaagattgcaaccaagatactactccatctcctcttctccaaagatgtccccaaacagaattcacgtcacttgtgctttggtttacgaaaccactccagctggtagaattcacagaggtttgtgttccacctggatgaagaatgccgtcccattaactgaatctccagactgttcccaagcttctatcttcgtcagaacttccaacttcagattgccagtcgatccaaaggtcccagttatcatgatcggtccaggtactggtttggctccattcagaggtttcttgcaagaaagattagctttgaaagaatctggtactgaattgggttcctccatcttcttcttcggttgtagaaacagaaaggtcgattttatctacgaagatgaattgaacaacttcgttgaaactggtgctttgtctgaattgattgtcgctttctccagagaaggtactgccaaggaatacgtccaacacaagatgtcccaaaaggcttctgatatctggaagttgttgtctgaaggtgcttacttgtacgtttgtggtgatgctaaaggtatggccaaggacgttcacagaactttgcacactattgttcaagaacaaggttctttggactcctccaaggctgaattatacgtcaagaacttgcaaatgtccggtcgttacttgagagatgtatgg

SEQ ID NO: 78 - protein, 710 aa, Stevia rebaudiana
MQSDSVKVSPFDLVSAAMNGKAMEKLNASESEDPTTLPALKMLVENRELLTLFTTSFAVLIGCLVFLMWRRSSSKKLVQDPVPQVIVVKKKEKESEVDDGKKKVSIFYGTQTGTAEGFAKALVEEAKVRYEKTSFKVIDLDDYAADDDEYEEKLKKESLAFFFLATYGDGEPTDNAANFYKWFTEGDDKGEWLKKLQYGVFGLGNRQYEHFNKIAIVVDDKLTEMGAKRLVPVGLGDDDQCIEDDFTAWKELVWPELDQLLRDEDDTSVTTPYTAAVLEYRVVYHDKPADSYAEDQTHTNGHVVHDAQHPSRSNVAFKKELHTSQSDRSCTHLEFDISHTGLSYETGDHVGVYSENLSEVVDEALKLLGLSPDTYFSVHADKEDGTPIGGASLPPPFPPCTLRDALTRYADVLSSPKKVALLALAAHASDPSEADRLKFLASPAGKDEYAQWIVANQRSLLEVMQSFPSAKPPLGVFFAAVAPRLQPRYYSISSSPKMSPNRIHVTCALVYETTPAGRIHRGLCSTWMKNAVPLTESPDCSQASIFVRTSNFRLPVDPKVPVIMIGPGTGLAPFRGFLQERLALKESGTELGSSIFFFGCRNRKVDFIYEDELNNFVETGALSELIVAFSREGTAKEYVQHKMSQKASDIWKLLSEGAYLYVCGDAKGMAKDVHRTLHTIVQEQGSLDSSKAELYVKNLQMSGRYLRDVW

SEQ ID NO: 79 - DNA, 1575 bp, Saccharomyces cerevisiae
  CDS (1)..(1575)
atggaccaattggtcaagactgaagtcaccaagaaatctttcactgctccagtccaaaaggcttccactccagttttgaccaacaagaccgtcatctccggttccaaggttaaatctttgtcctctgctcaatcttcctcctctggtccatcttcttcttctgaagaagatgattccagagatatcgaatctttggacaagaaaatcagaccattggaagaattggaagctctattgtcctctggtaacactaagcaattaaagaacaaggaagttgctgctttggttatccacggtaaattgccattgtacgctttggaaaagaaattaggtgacaccaccagagctgttgctgtcagaagaaaggctttgtccattttggctgaagctccagtcttggcttccgacagattaccatacaagaactacgactacgaccgtgtctttggtgcttgttgtgaaaatgtcattggttacatgccattaccagttggtgtcattggtccattggttatcgacggtacttcttaccacatcccaatggctaccactgaaggttgtttggttgcttctgccatgagaggttgtaaggccatcaacgctggtggtggtgctaccaccgttttgactaaggatggtatgaccagaggtcctgttgtcagattcccaactttgaagagatctggtgcttgtaagatctggttggattctgaagaaggtcaaaacgccatcaagaaggctttcaactccacttccagattcgctagattgcaacacattcaaacttgtttagctggtgacttgttgttcatgagattcagaaccaccactggtgacgctatgggtatgaacatgatctccaagggtgttgaatactctttgaagcaaatggttgaagaatacggttgggaagatatggaagttgtctctgtttctggtaactactgtaccgacaagaagccagctgccatcaactggatcgaaggtcgtggtaagtccgttgttgctgaagctaccattccaggtgacgttgtcagaaaggttttgaaatctgatgtttctgctttagtcgaattgaacattgccaagaacttggtcggttctgccatggctggttccgtcggtggtttcaacgctcatgccgctaacttggtcactgctgttttcttggctttaggtcaagatccagctcaaaatgtcgaatcctctaactgtatcactttgatgaaggaagttgacggtgatttgagaatttctgtttccatgccatccattgaagtcggtactatcggtggtggtactgtcttggaaccacaaggtgccatgttggacttgttgggtgttcgtggtccacacgctaccgctccaggtactaacgccagacaattggccagaattgttgcctgtgccgtcttggctggtgaattgtctctatgtgccgctttggctgctggtcacttggttcaatctcacatgacccacaacagaaagcctgctgaaccaaccaaaccaaacaacttggatgctactgacattaacagattaaaggacggttctgtcacctgtatcaagtct

SEQ ID NO: 80 - protein, 525 aa, Saccharomyces cerevisiae
MDQLVKTEVTKKSFTAPVQKASTPVLTNKTVISGSKVKSLSSAQSSSSGPSSSSEEDDSRDIESLDKKIRPLEELEALLSSGNTKQLKNKEVAALVIHGKLPLYALEKKLGDTTRAVAVRRKALSILAEAPVLASDRLPYKNYDYDRVFGACCENVIGYMPLPVGVIGPLVIDGTSYHIPMATTEGCLVASAMRGCKAINAGGGATTVLTKDGMTRGPVVRFPTLKRSGACKIWLDSEEGQNAIKKAFNSTSRFARLQHIQTCLAGDLLFMRFRTTTGDAMGMNMISKGVEYSLKQMVEEYGWEDMEVVSVSGNYCTDKKPAAINWIEGRGKSVVAEATIPGDVVRKVLKSDVSALVELNIAKNLVGSAMAGSVGGFNAHAANLVTAVFLALGQDPAQNVESSNCITLMKEVDGDLRISVSMPSIEVGTIGGGTVLEPQGAMLDLLGVRGPHATAPGTNARQLARIVACAVLAGELSLCAALAAGHLVQSHMTHNRKPAEPTKPNNLDATDINRLKDGSVTCIKS

SEQ ID NO: 81 - DNA, 1056 bp, Saccharomyces cerevisiae
  CDS (1)..(1056)
atggcttctgaaaaggaaatcagaagagaacgtttcttgaatgttttcccaaaattggttgaagaattgaacgcttctctattagcttacggtatgccaaaggaagcttgtgactggtacgctcactctttgaactacaacaccccaggtggtaagttgaacagaggtctatccgttgttgacacctacgccattttgtccaacaagaccgtcgaacaattaggtcaagaagaatacgaaaaggttgccatcttaggttggtgtatcgaattgttgcaagcttacttcttggttgctgatgacatgatggacaaatctatcaccagaagaggtcaaccatgttggtacaaggttccagaagtcggtgaaattgccatcaacgatgctttcatgttggaagctgccatctacaagttgttgaagtctcacttcagaaacgaaaagtactacattgacatcactgaattattccacgaagttactttccaaaccgaattgggtcaattgatggacttgattaccgctccagaagataaggtcgatttgtccaaattttccttgaagaaacactctttcattgtcactttcaagactgcttactactccttttacttgcctgttgctttggccatgtatgtcgctggtatcaccgatgaaaaggacttgaagcaagctcgtgatgtcttgattccattaggtgaatacttccaaatccaagatgactacttggactgtttcggtactccagaacaaatcggtaagattggtactgatatccaagacaacaagtgttcctgggttatcaacaaggctttggaattggcttctgctgaacaaagaaagactttggacgaaaactacggtaagaaggactctgttgctgaagctaagtgtaagaagatcttcaacgatttgaaaattgaacaattataccatgaatacgaagaatctattgccaaggacttgaaagccaagatctctcaagtcgacgaatccagaggtttcaaggctgatgtcttgactgctttcttgaacaaggtctacaagagatcaaaa

SEQ ID NO: 82 - protein, 352 aa, Saccharomyces cerevisiae
MASEKEIRRERFLNVFPKLVEELNASLLAYGMPKEACDWYAHSLNYNTPGGKLNRGLSVVDTYAILSNKTVEQLGQEEYEKVAILGWCIELLQAYFLVADDMMDKSITRRGQPCWYKVPEVGEIAINDAFMLEAAIYKLLKSHFRNEKYYIDITELFHEVTFQTELGQLMDLITAPEDKVDLSKFSLKKHSFIVTFKTAYYSFYLPVALAMYVAGITDEKDLKQARDVLIPLGEYFQIQDDYLDCFGTPEQIGKIGTDIQDNKCSWVINKALELASAEQRKTLDENYGKKDSVAEAKCKKIFNDLKIEQLYHEYEESIAKDLKAKISQVDESRGFKADVLTAFLNKVYKRSK

SEQ ID NO: 83 - DNA, 1005 bp, Saccharomyces cerevisiae
  CDS (1)..(1005)
atggaagctaagattgacgaattgatcaacaacgaccctgtctggtcctctcaaaacgaatctttgatctccaagccatacaaccacatcttgttgaagccaggtaagaacttcagattaaacttgattgttcaaatcaacagagttatgaacttgccaaaggaccaattggccattgtttcccaaattgtcgaattgttgcacaactcctctctattgatcgatgacattgaagataatgctccattaagaagaggtcaaaccacttctcatttgattttcggtgtcccatccaccatcaacactgctaactacatgtacttcagagccatgcaattggtttctcaattgaccaccaaggaaccattataccacaacttgatcactatctttaacgaagaattgattaacttgcaccgtggtcaaggtttggacatctactggagagatttcttgccagaaattattccaactcaagaaatgtacttgaacatggtcatgaacaagactggtggtttattcagattgactttacgtttgatggaagctttgtctccatcttcccaccacggtcactctttggttccattcatcaatctattaggtatcatctaccaaatcagagatgattacttgaacttgaaggacttccaaatgtcctctgaaaagggtttcgctgaagatatcactgaaggtaaattgtctttcccaattgtccacgccttgaactttaccaagaccaagggtcaaactgaacaacacaacgaaattttgagaatcttattgttgagaacttctgacaaggacatcaagttgaaattgatccaaatcttggaattcgataccaactctttggcttacaccaagaacttcatcaaccaattggttaacatgatcaagaatgacaacgaaaacaaatacttgccagacttggcttcccactccgataccgctaccaacttgcacgacgaattgttgtacattattgaccatttgtctgagtta

SEQ ID NO: 84 - protein, 335 aa, Saccharomyces cerevisiae [sequence omitted]

SEQ ID NO: 85 - DNA, 1575 bp, Gibberella fujikuroi
  CDS (1)..(1575)
atgtccaagtctaactccatgaactccacttctcacgaaactttattccaacaattggttttgggtttggacagaatgccattgatggatgtccactggttgatctacgttgctttcggtgcttggttatgttcctacgtcattcacgttttgtcctcttcttctaccgtcaaggttccagttgtcggttacagatccgttttcgaaccaacctggttattgagattaagatttgtctgggaaggtggttccattattggtcaaggttacaacaaattcaaggactctatcttccaagtcagaaagttgggtactgacattgttatcatcccaccaaactacatcgatgaagtcagaaagttgtcccaagacaagaccagatctgttgaaccattcatcaacgatttcgctggtcaatacaccagaggtatggtctttctacaatctgatttgcaaaaccgtgtcatccaacaaagattgactccaaagttggtttctttgactaaggtcatgaaggaagaattggactacgctttgaccaaggaaatgccagacatgaagaacgacgaatgggttgaagttgacatttcttccatcatggtcagattgatctccagaatctctgcccgtgttttcttgggtccagaacactgtcgtaaccaagaatggttgaccaccactgctgaatactctgaatctttattcatcactggtttcatcttgagagttgtcccacacatcttaagaccattcattgctccattgttgccttcttacagaactttgttgagaaatgtctcttctggtagaagagttatcggtgatatcatcagatctcaacaaggtgatggtaacgaagatatcttgtcctggatgagagatgctgctaccggtgaagaaaagcaaattgacaacattgctcaaagaatgttgatcttgtctttggcttccattcacaccaccgccatgaccatgacccatgccatgtacgacttgtgtgcctgtccagaatacattgaaccattacgtgacgaagtcaaatccgttgttggtgcttctggttgggacaagactgctttgaacagattccacaagttggactctttcttgaaggaatctcaaagattcaacccagttttcttgttgactttcaacagaatctaccatcaatccatgactttgtccgatggtaccaacattccatctggtaccagaattgctgttccatctcacgctatgttgcaagattctgctcacgttccaggtccaactcctccaactgaatttgacggtttcagatactccaagatcagatctgactctaactatgctcaaaagtacttgttctccatgaccgattcttccaacatggctttcggttacggtaagtacgcttgtccaggtcgtttctacgcctccaacgaaatgaaattgactttggccattttgttgttgcaatttgaattcaaattgccagatggtaagggtagaccaagaaacatcactatcgactctgacatgattccagacccaagagctagattatgtgtcagaaagagatctctacgtgacgaa

SEQ ID NO: 86 - protein, 525 aa, Gibberella fujikuroi
MSKSNSMNSTSHETLFQQLVLGLDRMPLMDVHWLIYVAFGAWLCSYVIHVLSSSSTVKVPVVGYRSVFEPTWLLRLRFVWEGGSIIGQGYNKFKDSIFQVRKLGTDIVIIPPNYIDEVRKLSQDKTRSVEPFINDFAGQYTRGMVFLQSDLQNRVIQQRLTPKLVSLTKVMKEELDYALTKEMPDMKNDEWVEVDISSIMVRLISRISARVFLGPEHCRNQEWLTTTAEYSESLFITGFILRVVPHILRPFIAPLLPSYRTLLRNVSSGRRVIGDIIRSQQGDGNEDILSWMRDAATGEEKQIDNIAQRMLILSLASIHTTAMTMTHAMYDLCACPEYIEPLRDEVKSVVGASGWDKTALNRFHKLDSFLKESQRFNPVFLLTFNRIYHQSMTLSDGTNIPSGTRIAVPSHAMLQDSAHVPGPTPPTEFDGFRYSKIRSDSNYAQKYLFSMTDSSNMAFGYGKYACPGRFYASNEMKLTLAILLLQFEFKLPDGKGRPRNITIDSDMIPDPRARLCVRKRSLRDE

SEQ ID NO: 87 - DNA, 1419 bp, Stevia rebaudiana
  CDS (1)..(1419)
atggccacttctgactccatcgttgatgacagaaagcaattgcacgttgctactttcccatggttagctttcggtcacattttgccatacttgcaattgtccaaattgattgctgaaaagggtcacaaagtctctttcttgtccaccaccagaaacatccaaagattatcttctcacatttctccattgatcaacgttgtccaattgactttaccaagagttcaagaattgccagaagatgctgaagctaccaccgatgtccatccagaagatatcccatacttgaagaaggcttctgatggtttgcaaccagaagtcactagattcttggaacaacactctccagactggattatctacgactacactcactactggttaccatccattgctgcctctttgggtatctctcgtgctcatttctccgttaccactccatgggctattgcttacatgggtccatctgctgatgctatgatcaacggttctgatggtagaaccactgtcgaagacttgaccactccaccaaaatggttcccattcccaaccaaggtctgttggagaaagcacgatttggccagattagttccatacaaggccccaggtatctctgacggttacagaatgggtttagtcttgaagggttctgactgtttgttgtccaagtgttaccatgaattcggtactcaatggttacctttgttggaaactttgcaccaagtcccagttgttccagttggtttgttgcctcctgaaatcccaggtgacgaaaaggacgaaacctgggtttccatcaagaaatggttagatggtaagcaaaagggttccgttgtctacgttgctttgggttctgaagtcttggtttctcaaactgaagttgttgaattggctttgggtttggaattgtccggtctaccatttgtctgggcttacagaaagccaaagggtccagctaagtctgactctgttgaattgccagatggtttcgtcgaaagaaccagagacagaggtttggtctggacttcctgggctccacaattgagaattttgtcccacgaatctgtttgtggtttcttgacccactgtggttctggttccattgtcgaaggtttgatgttcggtcacccattgatcatgttgccaatcttcggtgaccaaccattgaacgctagattattggaagacaagcaagtcggtattgaaatcccaagaaacgaagaagacggttgtttgaccaaggaatctgttgcccgttctctaagatctgttgttgtcgaaaaggaaggtgaaatctacaaggctaacgctagagaattgtccaagatctacaacgataccaaggtcgaaaaggaatatgtctcccaatttgttgactacttggaaaagaacgctcgtgccgttgccattgaccacgaaagc

SEQ ID NO: 88 - protein, 473 aa, Stevia rebaudiana
MATSDSIVDDRKQLHVATFPWLAFGHILPYLQLSKLIAEKGHKVSFLSTTRNIQRLSSHISPLINVVQLTLPRVQELPEDAEATTDVHPEDIPYLKKASDGLQPEVTRFLEQHSPDWIIYDYTHYWLPSIAASLGISRAHFSVTTPWAIAYMGPSADAMINGSDGRTTVEDLTTPPKWFPFPTKVCWRKHDLARLVPYKAPGISDGYRMGLVLKGSDCLLSKCYHEFGTQWLPLLETLHQVPVVPVGLLPPEIPGDEKDETWVSIKKWLDGKQKGSVVYVALGSEVLVSQTEVVELALGLELSGLPFVWAYRKPKGPAKSDSVELPDGFVERTRDRGLVWTSWAPQLRILSHESVCGFLTHCGSGSIVEGLMFGHPLIMLPIFGDQPLNARLLEDKQVGIEIPRNEEDGCLTKESVARSLRSVVVEKEGEIYKANARELSKIYNDTKVEKEYVSQFVDYLEKNARAVAIDHES

SEQ ID NO: 89 - DNA, 1575 bp, Stevia rebaudiana
  CDS (1)..(1575)
atgggtttgttcccattagaggattcctacgcgctggtctttgaaggactagcaataacactggctttgtactatctactgtctttcatctacaaaacatctaaaaagacatgtacacctcctaaagcatctggtgaaatcattccaattacaggaatcatattgaatctgctatctggctcaagtggtctacctattatcttagcacttgcctctttagcagacagatgtggtcctattttcaccattaggctgggtattaggagagtgctagtagtatcaaattgggaaatcgctaaggagattttcactacccacgatttgatagtttctaatagaccaaaatacttagccgctaagattcttggtttcaattatgtttcattctctttcgctccatacggcccatattgggtcggaatcagaaagattattgctacaaaactaatgtcttcttccagacttcagaagttgcaatttgtaagagtttttgaactagaaaactctatgaaatctatcagagaatcatggaaggagaaaaaggatgaagagggaaaggtattagttgagatgaaaaagtggttctgggaactgaatatgaacatagtgttaaggacagttgctggtaaacaatacactggtacagttgatgatgccgatgcaaagcgtatctccgagttattcagagaatggtttcactacactggcagatttgtcgttggagatgcttttccttttctaggttggttggacctgggcggatacaaaaagacaatggaattagttgctagtagattggactcaatggtcagtaaatggttagatgagcatcgtaaaaagcaagctaacgatgacaaaaaggaggatatggatttcatggatatcatgatctccatgacagaagcaaattcaccacttgaaggatacggcactgatactattatcaagaccacatgtatgactttgattgtttcaggagttgatacaacctcaatcgtacttacttgggccttatcacttttgttaaacaacagagatactttgaaaaaggcacaagaggaattagatatgtgcgtaggtaaaggaagacaagtcaacgagtctgatcttgttaacttgatatacttggaagcagtgcttaaagaggctttaagactttacccagcagcgttcttaggcggaccaagagcattcttggaagattgtactgttgctggttatagaattccaaagggcacctgcttgttgattaacatgtggaaactgcatagagatccaaacatttggagtgatccttgcgaattcaagccagaaagatttttgacacctaatcaaaaggatgttgatgtgatcggtatggatttcgaattgataccatttggtgccggcagaagatattgtccaggtactagattggctttacagatgttgcatatcgtattagcgacattgctgcaaaacttcgaaatgtcaacaccaaacgatgcgccagtcgatatgactgcttctgttggcatgacaaatgccaaagcatcacctttagaagtcttgctatcacctcgtgttaaatggtcc

SEQ ID NO: 90 - protein, 525 aa, Stevia rebaudiana
MGLFPLEDSYALVFEGLAITLALYYLLSFIYKTSKKTCTPPKASGEIIPITGIILNLLSGSSGLPIILALASLADRCGPIFTIRLGIRRVLVVSNWEIAKEIFTTHDLIVSNRPKYLAAKILGFNYVSFSFAPYGPYWVGIRKIIATKLMSSSRLQKLQFVRVFELENSMKSIRESWKEKKDEEGKVLVEMKKWFWELNMNIVLRTVAGKQYTGTVDDADAKRISELFREWFHYTGRFVVGDAFPFLGWLDLGGYKKTMELVASRLDSMVSKWLDEHRKKQANDDKKEDMDFMDIMISMTEANSPLEGYGTDTIIKTTCMTLIVSGVDTTSIVLTWALSLLLNNRDTLKKAQEELDMCVGKGRQVNESDLVNLIYLEAVLKEALRLYPAAFLGGPRAFLEDCTVAGYRIPKGTCLLINMWKLHRDPNIWSDPCEFKPERFLTPNQKDVDVIGMDFELIPFGAGRRYCPGTRLALQMLHIVLATLLQNFEMSTPNDAPVDMTASVGMTNAKASPLEVLLSPRVKWS

SEQ ID NO: 91 - DNA, 1428 bp, Stevia rebaudiana
  CDS (1)..(1428)
atgatacaagttttaactccaattctactcttcctcatcttcttcgttttctggaaagtctacaaacatcaaaagactaaaatcaatctaccaccaggttccttcggctggccatttttgggtgaaaccttagccttacttagagcaggctgggattctgagccagaaagattcgtaagagagcgtatcaaaaagcatggatctccacttgttttcaagacatcactatttggagacagattcgctgttctttgcggtccagctggtaataagtttttgttctgcaacgaaaacaaattagtggcatcttggtggccagtccctgtaaggaagttgttcggtaaaagtttactcacaataagaggagatgaagcaaaatggatgagaaaaatgctattgtcttacttgggtccagatgcatttgccacacattatgccgttactatggatgttgtaacacgtagacatattgatgtccattggaggggcaaggaggaagttaatgtatttcaaacagttaagttgtacgcattcgaattagcttgtagattattcatgaacctagatgacccaaaccacatcgcgaaactcggtagtcttttcaacattttcctcaaagggatcatcgagcttcctatagacgttcctggaactagattttactccagtaaaaaggccgcagctgccattagaattgaattgaaaaagctcattaaagctagaaaactcgaattgaaggagggtaaggcgtcttcttcacaggacttgctttctcatctattaacatcacctgatgagaatgggatgttcttgacagaagaggaaatagtcgataacattctacttttgttattcgctggtcacgatacctctgcactatcaataacacttttgatgaaaaccttaggtgaacacagtgatgtgtacgacaaggttttgaaggaacaattagaaatttccaaaacaaaggaggcttgggaatcactaaagtgggaagatatccagaagatgaagtactcatggtcagtaatctgtgaagtcatgagattgaatcctcctgtcatagggacatacagagaggcgttggttgatatcgactatgctggttacactatcccaaaaggatggaagttgcattggtcagctgtttctactcaaagagatgaagccaatttcgaagatgtaactagattcgatccatccagatttgaaggggcaggccctactccattcacatttgtgcctttcggtggaggtcctagaatgtgtttaggcaaagagtttgccaggttagaagtgttagcatttctccacaacattgttaccaactttaagtgggatcttctaatccctgatgagaagatcgaatatgatccaatggctactccagctaagggcttgccaattagacttcatccacaccaagtc

SEQ ID NO: 92 - protein, 476 aa, Stevia rebaudiana; identical to SEQ ID NO: 32

SEQ ID NO: 93 - DNA, 1575 bp, Arabidopsis thaliana
  CDS (1)..(1575)
atggagtctttagtggttcatacagtaaatgctatctggtgtattgtaatcgtcgggattttctcagttggttatcacgtttacggtagagctgtggtcgaacaatggagaatgagaagatcactgaagctacaaggtgttaaaggcccaccaccatccatcttcaatggtaacgtttcagaaatgcaacgtatccaatccgaagctaaacactgctctggcgataacattatctcacatgattattcttcttcattattcccacacttcgatcactggagaaaacagtacggcagaatctacacatactctactggattaaagcaacacttgtacatcaatcatccagaaatggtgaaggagctatctcagactaacacattgaacttgggtagaatcacccatataaccaaaagattgaatcctatcttaggtaacggaatcataacctctaatggtcctcattgggcccatcagcgtagaattatcgcctacgagtttactcatgataagatcaagggtatggttggtttgatggttgagtctgctatgcctatgttgaataagtgggaggagatggtaaagagaggcggagaaatgggatgcgacataagagttgatgaggacttgaaagatgtttcagcagatgtgattgcaaaagcctgtttcggatcctcattttctaaaggtaaggctattttctctatgataagagatttgcttacagctatcacaaagagaagtgttctattcagattcaacggattcactgatatggtctttgggagtaaaaagcatggtgacgttgatatagacgctttagaaatggaattggaatcatccatttgggaaactgtcaaggaacgtgaaatagaatgtaaagatactcacaaaaaggatctgatgcaattgattttggaaggggcaatgcgttcatgtgacggtaacctttgggataaatcagcatatagaagatttgttgtagataattgtaaatctatctacttcgcagggcatgatagtacagctgtctcagtgtcatggtgtttgatgttactggccctaaacccatcatggcaagttaagatccgtgatgaaattctgtcttcttgcaaaaatggtattccagatgccgaaagtatcccaaaccttaaaacagtgactatggttattcaagagacaatgagattataccctccagcaccaatcgtcgggagagaagcctctaaagatatcagattgggcgatctagttgttcctaaaggcgtctgtatatggacactaataccagctttacacagagatcctgagatttggggaccagatgcaaacgatttcaaaccagaaagattttctgaaggaatttcaaaggcttgtaagtatcctcaaagttacattccatttggtctgggtcctagaacatgcgttggtaaaaactttggcatgatggaagtaaaggttcttgtttccctgattgtctccaagttctctttcactctatctcctacctaccaacatagtcctagtcacaaacttttagtagaaccacaacatggggtggtaattagagtggtt

SEQ ID NO: 94 - protein, 525 aa, Arabidopsis thaliana; identical to SEQ ID NO: 34

SEQ ID NO: 95 - DNA, 1587 bp, Vitis vinifera
  CDS (1)..(1587)
atgtacttcctactacaatacctcaacatcacaaccgttggtgtctttgccacattgtttctctcttattgtttacttctctggagaagtagagcgggtaacaaaaagattgccccagaagctgccgctgcatggcctattatcggccacctccacttacttgcaggtggatcccatcaactaccacatattacattgggtaacatggcagataagtacggtcctgtattcacaatcagaataggcttgcatagagctgtagttgtctcatcttgggaaatggcaaaggaatgttcaacagctaatgatcaagtgtcttcttcaagacctgaactattagcttctaagttgttgggttataactacgccatgtttggtttttcaccatacggttcatactggagagaaatgagaaagatcatctctctcgaattactatctaattccagattggaactattgaaagatgttagagcctcagaagttgtcacatctattaaggaactatacaaattgtgggcggaaaagaagaatgagtcaggattggtttctgtcgagatgaaacaatggttcggagatttgactttaaacgtgatcttgagaatggtggctggtaaaagatacttctccgcgagtgacgcttcagaaaacaaacaggcccagcgttgtagaagagtcttcagagaattcttccatctctccggcttgtttgtggttgctgatgctataccttttcttggatggctcgattggggaagacacgagaagaccttgaaaaagaccgccatagaaatggattccatcgcccaggagtggcttgaggaacatagacgtagaaaagattctggagatgataattctacccaagatttcatggacgttatgcaatctgtgctagatggcaaaaatctaggcggatacgatgctgatacgattaacaaggctacatgcttaactcttatatcaggtggcagtgatactactgtagtttctttgacatgggctcttagtcttgtgttaaacaatagagatactttgaaaaaggcacaggaagagttagacatccaagtcggtaaggaaagattggttaacgagcaagacatcagtaagttagtttacttgcaagcaatagtaaaagagacactcagactttatccaccaggtcctttgggtggtttgagacaattcactgaagattgtacactaggtggctatcacgtttcaaaaggaactagattaatcatgaacttatccaagattcaaaaagatccacgtatttggtctgatcctactgaattccaaccagagagattccttacgactcataaagatgtcgatccacgtggtaaacactttgaattcattccattcggtgcaggaagacgtgcatgtcctggtatcacattcggattacaagtactacatctaacattggcatctttcttgcatgcgtttgaattttcaacaccatcaaatgagcaggttaacatgagagaatcattaggtcttacgaatatgaaatctaccccattagaagttttgatttctccaagactatcccttaattgcttcaaccttatgaaaatt

SEQ ID NO: 96 - protein, 529 aa, Vitis vinifera
MYFLLQYLNITTVGVFATLFLSYCLLLWRSRAGNKKIAPEAAAAWPIIGHLHLLAGGSHQLPHITLGNMADKYGPVFTIRIGLHRAVVVSSWEMAKECSTANDQVSSSRPELLASKLLGYNYAMFGFSPYGSYWREMRKIISLELLSNSRLELLKDVRASEVVTSIKELYKLWAEKKNESGLVSVEMKQWFGDLTLNVILRMVAGKRYFSASDASENKQAQRCRRVFREFFHLSGLFVVADAIPFLGWLDWGRHEKTLKKTAIEMDSIAQEWLEEHRRRKDSGDDNSTQDFMDVMQSVLDGKNLGGYDADTINKATCLTLISGGSDTTVVSLTWALSLVLNNRDTLKKAQEELDIQVGKERLVNEQDISKLVYLQAIVKETLRLYPPGPLGGLRQFTEDCTLGGYHVSKGTRLIMNLSKIQKDPRIWSDPTEFQPERFLTTHKDVDPRGKHFEFIPFGAGRRACPGITFGLQVLHLTLASFLHAFEFSTPSNEQVNMRESLGLTNMKSTPLEVLISPRLSLNCFNLMKI

SEQ ID NO: 97 - DNA, 1437 bp, Medicago truncatula
  CDS (1)..(1437)
atggaacctaacttttacttgtcattactattgttgttcgtgaccttcatttctttaagtctgtttttcatcttttacaaacaaaagtccccattgaatttgccaccagggaaaatgggttaccctatcataggtgaaagtttagaattcctatccacaggctggaagggacatcctgaaaagttcatatttgatagaatgcgtaagtacagtagtgagttattcaagacttctattgtaggcgaatccacagttgtttgctgtggggcagctagtaacaaattcctattctctaacgaaaacaaactggtaactgcctggtggccagattctgttaacaaaatcttcccaacaacttcactggattctaatttgaaggaggaatctataaagatgagaaagttgctgccacagttcttcaaaccagaagcacttcaaagatacgtcggcgttatggatgtaatcgcacaaagacattttgtcactcactgggacaacaaaaatgagatcacagtttatccacttgctaaaagatacactttcttgcttgcgtgtagactgttcatgtctgttgaggatgaaaatcatgtggcgaaattctcagacccattccaactaatcgctgcaggcatcatttcacttcctatcgatcttcctggtactccattcaacaaggccataaaggcttcaaatttcattagaaaagagctgataaagattatcaaacaaagacgtgttgatctggcagagggtacagcatctccaacccaggatatcttgtcacatatgctattaacatctgatgaaaacggtaaatctatgaacgagttgaacattgccgacaagattcttggactattgataggaggccacgatacagcttcagtagcttgcacatttctagtgaagtacttaggagaattaccacatatctacgataaagtctaccaagagcaaatggaaattgccaagtccaaacctgctggggaattgttgaattgggatgacttgaaaaagatgaagtattcatggaatgtggcatgtgaggtaatgagattgtcaccacctttacaaggtggttttagagaggctataactgactttatgtttaacggtttctctattccaaaagggtggaagttatactggtccgccaactctacacacaaaaatgcagaatgtttcccaatgcctgagaaattcgatcctaccagatttgaaggtaatggtccagcgccttatacatttgtaccattcggtggaggccctagaatgtgtcctggaaaggaatacgctagattagaaatcttggttttcatgcataatctggtcaaacgttttaagtgggaaaaggttattccagacgaaaagattattgtcgatccattcccaatcccagctaaagatcttccaatccgtttgtatcctcacaaagct

SEQ ID NO: 98 - protein, 479 aa, Medicago truncatula
MEPNFYLSLLLLFVTFISLSLFFIFYKQKSPLNLPPGKMGYPIIGESLEFLSTGWKGHPEKFIFDRMRKYSSELFKTSIVGESTVVCCGAASNKFLFSNENKLVTAWWPDSVNKIFPTTSLDSNLKEESIKMRKLLPQFFKPEALQRYVGVMDVIAQRHFVTHWDNKNEITVYPLAKRYTFLLACRLFMSVEDENHVAKFSDPFQLIAAGIISLPIDLPGTPFNKAIKASNFIRKELIKIIKQRRVDLAEGTASPTQDILSHMLLTSDENGKSMNELNIADKILGLLIGGHDTASVACTFLVKYLGELPHIYDKVYQEQMEIAKSKPAGELLNWDDLKKMKYSWNVACEVMRLSPPLQGGFREAITDFMFNGFSIPKGWKLYWSANSTHKNAECFPMPEKFDPTRFEGNGPAPYTFVPFGGGPRMCPGKEYARLEILVFMHNLVKRFKWEKVIPDEKIIVDPFPIPAKDLPIRLYPHKA

SEQ ID NO: 99 - DNA, 1419 bp, Stevia rebaudiana
  CDS (1)..(1419)
atggctacatctgattctattgttgatgacaggaagcagttgcatgtggctactttcccttggcttgctttcggtcatatactgccttacctacaactatcaaaactgatagctgaaaaaggacataaagtgtcattcctttcaacaactagaaacattcaaagattatcttcccacatatcaccattgattaacgtcgttcaattgacacttccaagagtacaggaattaccagaagatgctgaagctacaacagatgtgcatcctgaagatatcccttacttgaaaaaggcatccgatggattacagcctgaggtcactagattccttgagcaacacagtccagattggatcatatacgactacactcactattggttgccttcaattgcagcatcactaggcatttctagggcacatttcagtgtaaccacaccttgggccattgcttacatgggtccatccgctgatgctatgattaacggcagtgatggtagaactaccgttgaagatttgacaaccccaccaaagtggtttccatttccaactaaagtctgttggagaaaacacgacttagcaagactggttccatacaaggcaccaggaatctcagacggctatagaatgggtttagtccttaaagggtctgactgcctattgtctaagtgttaccatgagtttgggacacaatggctaccacttttggaaacattacaccaagttcctgtcgtaccagttggtctattacctccagaaatccctggtgatgagaaggacgagacttgggtttcaatcaaaaagtggttagacgggaagcaaaaaggctcagtggtatatgtggcactgggttccgaagttttagtatctcaaacagaagttgtggaacttgccttaggtttggaactatctggattgccatttgtctgggcctacagaaaaccaaaaggccctgcaaagtccgattcagttgaattgccagacggctttgtcgagagaactagagatagagggttggtatggacttcatgggctccacaattgagaatcctgagtcacgaatctgtgtgcggtttcctaacacattgtggttctggttctatagttgaaggactgatgtttggtcatccacttatcatgttgccaatctttggtgaccagcctttgaatgcacgtctgttagaagataaacaagttggaattgaaatcccacgtaatgaggaagatggatgtttaaccaaggagtctgtggccagatcattacgttccgttgtcgttgaaaaggaaggcgaaatctacaaggccaatgcccgtgaactttcaaagatctacaatgacacaaaagtagagaaggaatatgtttctcaatttgtagattacctagagaaaaacgctagagccgtagctattgatcatgaatcc

SEQ ID NO: 100 - protein, 473 aa, Stevia rebaudiana; identical to SEQ ID NO: 88

SEQ ID NO: 101 - DNA, 1377 bp, Ipomoea purpurea
  CDS (1)..(1377)
atgggttctcaagctaccacctaccacatggccatgtacccatggttcggtgtcggtcatttgactggtttcttcagattggctaacaagttggctggtaagggtcacagaatctctttcttgattccaaagaacactcaatccaaattggaatctttcaacttgcacccacatttgatctctttcgttccaattgttgttccatccattccaggtctaccaccaggtgctgaaaccacctctgatgtcccattcccatctacccatttgttgatggaagctatggacaagactcaaaacgatattgaaatcatcttgaaggacttgaaggtcgatgtcgttttctacgatttcacccactggttaccatctttggccagaaagatcggtatcaaatccgtcttttactccaccatttctccattgatgcacggttacgctttgtccccagaaagaagagttgtcggtaagcaattgactgaagctgacatgatgaaggctccagcttctttcccagacccatccatcaaattgcacgctcacgaagccagaggtttcaccgccagaaccgttatgaagttcggtggtgatatcactttcttcgatcgtattttcactgctgtttctgaatctgatggtttggcttactccacttgtcgtgaaatcgaaggtcaattctgtgactacattgaaactcaattccaaaagccagtcttattggctggtccagctttgccagttccttccaagtccaccatggaacaaaaatggtctgactggttaggtaagttcaaggaaggttctgtcatttactgtgctttcggttctgaatgtaccttgagaaaggacaaattccaagaactattatggggtttggaattgactggtatgccattctttgctgctttgaagcctccatttgaaactgaatctgttgaagctgccatcccagaagaattgaaggaaaagatccaaggtagaggtatcgttcacggtgaatgggttcaacaacaattgtttttgcaacacccatctgttggttgtttcgtttcccactgtggttgggcttctttgtccgaagctttggtcaatgactgtcaaatcgtcttgttgccacaagtcggtgaccaaattattaacgccagaatcatgtccgtttctttgaaggttggtgttgaagtcgaaaagggtgaagaagatggtgttttctccagagaatctgtctgtaaggccgtcaaggctgtcatggatgaaaagtctgaaatcggtagagaagttagaggtaaccacgacaaattgagaggtttcttgatgaacgctgacttggactccaagtacatggactctttcaaccaaaagttgcaagacttattaggg

SEQ ID NO: 102 - protein, 459 aa, Ipomoea purpurea
MGSQATTYHMAMYPWFGVGHLTGFFRLANKLAGKGHRISFLIPKNTQSKLESFNLHPHLISFVPIVVPSIPGLPPGAETTSDVPFPSTHLLMEAMDKTQNDIEIILKDLKVDVVFYDFTHWLPSLARKIGIKSVFYSTISPLMHGYALSPERRVVGKQLTEADMMKAPASFPDPSIKLHAHEARGFTARTVMKFGGDITFFDRIFTAVSESDGLAYSTCREIEGQFCDYIETQFQKPVLLAGPALPVPSKSTMEQKWSDWLGKFKEGSVIYCAFGSECTLRKDKFQELLWGLELTGMPFFAALKPPFETESVEAAIPEELKEKIQGRGIVHGEWVQQQLFLQHPSVGCFVSHCGWASLSEALVNDCQIVLLPQVGDQIINARIMSVSLKVGVEVEKGEEDGVFSRESVCKAVKAVMDEKSEIGREVRGNHDKLRGFLMNADLDSKYMDSFNQKLQDLLG

SEQ ID NO: 103 - DNA, 1314 bp, Bellis perennis
  CDS (1)..(1314)
atggactctaagattgactccaagactttcagagttgttatgttgccatggttggcttactcccacatctcttctttcttggttttcgctaagagattgaccaaccacaacttccacatctacatctgttcctctcaaaccaacatgcaatacttgaagaacaacttgacttctcaatactccaagtccatccaattgattgaattgaacttgccatcttcttctgaattgccattgcaataccacaccacccacggtctaccacctcatttgaccaagactctatccgatgactaccaaaaatctggtccagacttcgaaaccatcttgatcaaattgaaccctcacttagtcatctacgacttcaaccaattatgggctccagaagttgcttccactttgcacattccatctatccaattgttgtccggttgtgttgctttgtacgctttggatgctcatttgtacaccaagccattggatgaaaacttggccaagttcccattcccagaaatctacccaaagaacagagatatcccaaagggtggttccaaatacatcgaaagatttgtcgactgtatgagaagatcttgtgaaatcatcttggtcagatccactatggaattggaaggtaagtacattgactacttgtctaagactttaggtaagaaggtcttaccagttggtccattagtccaagaagcttctttgttgcaagatgaccacatctggatcatgaaatggttggacaagaaggaagaatcctctgttgtctttgtttgtttcggttctgaatacattttgtctgacaacgaaatcgaagacattgcttacggtttggaattgtctcaagtctctttcgtctgggctatcagagccaagacctctgctttgaatggtttcattgaccgtgttggtgacaagggtttggtcattgacaaatgggttccacaagctaacatcttgtcccactcttccactggtggtttcatctcccactgtggttggtcctctaccatggaatccatcagatacggtgttccaatcattgctatgccaatgcaattcgatcaaccatacaacgccagattgatggaaactgtcggtgctggtattgaagttggtagagatggtgaaggtagattgaagcgtgaagaaattgccgctgttgtcagaaaggttgttgttgaagattctggtgaatctatcagagaaaaggccaaggaattaggtgaaattatgaagaagaacatggaagctgaagtcgatggtattgtcattgaaaacttagtcaaattgtgtgaaatgaacaac

SEQ ID NO: 104 - protein, 438 aa, Bellis perennis
MDSKIDSKTFRVVMLPWLAYSHISSFLVFAKRLTNHNFHIYICSSQTNMQYLKNNLTSQYSKSIQLIELNLPSSSELPLQYHTTHGLPPHLTKTLSDDYQKSGPDFETILIKLNPHLVIYDFNQLWAPEVASTLHIPSIQLLSGCVALYALDAHLYTKPLDENLAKFPFPEIYPKNRDIPKGGSKYIERFVDCMRRSCEIILVRSTMELEGKYIDYLSKTLGKKVLPVGPLVQEASLLQDDHIWIMKWLDKKEESSVVFVCFGSEYILSDNEIEDIAYGLELSQVSFVWAIRAKTSALNGFIDRVGDKGLVIDKWVPQANILSHSSTGGFISHCGWSSTMESIRYGVPIIAMPMQFDQPYNARLMETVGAGIEVGRDGEGRLKREEIAAVVRKVVVEDSGESIREKAKELGEIMKKNMEAEVDGIVIENLVKLCEMNN

SEQ ID NO: 105 - DNA, 1419 bp, Stevia rebaudiana
  CDS (1)..(1419)
atggccacttctgactctattgtcgatgacagaaagcaattgcacgttgccactttcccatggttggccttcggtcacattttgccatacttgcaattgtccaagttgattgctgaaaagggtcacaaggtttctttcttgtccactaccagaaacatccaaagattatcttctcacatctctccattaatcaacgttgtccaattgactttaccaagagttcaagaattgccagaagatgctgaagctaccaccgatgtccatccagaagatatcccatacttgaagaaggcttctgacggtttgcaacctgaagtcacccgtttcttggaacaacactctccagactggatcatctacgactacactcactactggttaccttccattgctgcttctttgggtatctcccgtgctcatttctccgtcaccactccatgggctattgcttacatgggtccatctgctgatgctatgatcaacggttctgatggtagaaccactgttgaagatttgaccactccaccaaaatggttcccattcccaactaaggtctgttggagaaagcacgatttggccagattggttccatacaaggctccaggtatctctgatggttacagaatgggtttggttttgaaaggttctgactgtttgttgtccaaatgttaccatgaattcggtactcaatggttaccattgttggaaactttgcaccaagttccagttgttccagtcggtctattaccaccagaagtcccaggtgacgaaaaggacgaaacctgggtttccatcaagaaatggttagatggtaagcaaaagggttccgttgtctacgttgctttgggttctgaagtcttggtttctcaaactgaagttgtcgaattggctttaggtttggaattgtccggtttgcctttcgtctgggcttacagaaagccaaagggtccagctaaatctgactccgtcgaattaccagacggtttcgttgaaagaacccgtgacagaggtttggtctggacttcctgggctccacaattgagaatcttgtcccacgaatctgtttgtggtttcttgacccactgtggttctggttccattgtcgaaggtttgatgtttggtcacccattgatcatgttgccaatcttcggtgaccaaccattgaacgccagattattggaagacaagcaagtcggtattgaaattccaagaaacgaagaagatggttgtttgaccaaggaatctgttgccagatctttgagatccgttgttgtcgaaaaggaaggtgaaatctacaaggctaacgctagagaattgtctaagatctacaacgacaccaaggttgaaaaggaatacgtttctcaatttgtcgactacttggaaaagaacaccagagctgttgccattgaccacgaaagt

SEQ ID NO: 106 - protein, 473 aa, Stevia rebaudiana
MATSDSIVDDRKQLHVATFPWLAFGHILPYLQLSKLIAEKGHKVSFLSTTRNIQRLSSHISPLINVVQLTLPRVQELPEDAEATTDVHPEDIPYLKKASDGLQPEVTRFLEQHSPDWIIYDYTHYWLPSIAASLGISRAHFSVTTPWAIAYMGPSADAMINGSDGRTTVEDLTTPPKWFPFPTKVCWRKHDLARLVPYKAPGISDGYRMGLVLKGSDCLLSKCYHEFGTQWLPLLETLHQVPVVPVGLLPPEVPGDEKDETWVSIKKWLDGKQKGSVVYVALGSEVLVSQTEVVELALGLELSGLPFVWAYRKPKGPAKSDSVELPDGFVERTRDRGLVWTSWAPQLRILSHESVCGFLTHCGSGSIVEGLMFGHPLIMLPIFGDQPLNARLLEDKQVGIEIPRNEEDGCLTKESVARSLRSVVVEKEGEIYKANARELSKIYNDTKVEKEYVSQFVDYLEKNTRAVAIDHES

SEQ ID NO: 107 - DNA, 1455 bp, Stevia rebaudiana
  CDS (1)..(1455)
atgtacaacgtcacctaccatcaaaactccaaggctatggctacttctgactctattgtcgatgacagaaagcaattgcacgttgccactttcccatggttagctttcggtcacatcttaccattcttgcaattgtccaaattgattgctgaaaagggtcacaaggtttctttcttgtctaccactagaaacattcaaagattgtcttcccacatctctccattgatcaacgttgttcaattgactctaccaagagtccaagaattaccagaagatgctgaagctaccaccgatgtccatccagaagatatccaatacttgaagaaggctgttgacggtttgcaaccagaagttaccagattcttggaacaacactctccagactggatcatctacgacttcacccactactggttaccttccattgctgcctccttgggtatctccagagcttacttctgtgttatcactccatggaccattgcttacttggctccatcttctgatgctatgatcaacgactctgacggtagaaccactgtcgaagatttgaccactccacctaaatggttcccattcccaactaaggtctgttggagaaagcatgacttggccagaatggaaccatacgaagctccaggtatctccgatggttacagaatgggtatggttttcaagggttctgactgtttgttgttcaagtgttaccacgaattcggtactcaatggttaccattgttggaaactttgcaccaagtcccagttgtcccagtcggtttgttgccaccagaaatcccaggtgacgaaaaggacgaaacctgggtttccatcaagaaatggttggatggtaagcaaaagggttccgttgtctacgttgccttgggttctgaagctttagtctctcaaactgaagttgttgaattggctttgggtttggaattgtctggtctaccatttgtctgggcttacagaaagccaaagggtccagccaaatctgactccgttgaattgccagatggtttcgtcgaacgtaccagagacagaggtttagtctggacttcctgggctcctcaattgagaatcttgtctcacgaatctgtctgtggtttcttgactcactgtggttctggttccattgtcgaaggtttgatgttcggtcacccattgattatgttgccaattttctgtgaccaaccattgaacgctagattattggaagacaaacaagtcggtattgaaatcccaagaaacgaagaagatggttgtttgaccaaggaatctgttgctcgttctttgagatctgttgttgtcgaaaacgaaggtgaaatctacaaggccaatgctcgtgctttgtccaagatctacaacgataccaaggttgaaaaggaatacgtttctcaatttgttgactacttggaaaagaacgccagagctgttgccattgaccacgaatcc

SEQ ID NO: 108 - protein, 485 aa, Stevia rebaudiana
MYNVTYHQNSKAMATSDSIVDDRKQLHVATFPWLAFGHILPFLQLSKLIAEKGHKVSFLSTTRNIQRLSSHISPLINVVQLTLPRVQELPEDAEATTDVHPEDIQYLKKAVDGLQPEVTRFLEQHSPDWIIYDFTHYWLPSIAASLGISRAYFCVITPWTIAYLAPSSDAMINDSDGRTTVEDLTTPPKWFPFPTKVCWRKHDLARMEPYEAPGISDGYRMGMVFKGSDCLLFKCYHEFGTQWLPLLETLHQVPVVPVGLLPPEIPGDEKDETWVSIKKWLDGKQKGSVVYVALGSEALVSQTEVVELALGLELSGLPFVWAYRKPKGPAKSDSVELPDGFVERTRDRGLVWTSWAPQLRILSHESVCGFLTHCGSGSIVEGLMFGHPLIMLPIFCDQPLNARLLEDKQVGIEIPRNEEDGCLTKESVARSLRSVVVENEGEIYKANARALSKIYNDTKVEKEYVSQFVDYLEKNARAVAIDHES

SEQ ID NO: 109 - DNA, 1419 bp, Stevia rebaudiana
  CDS (1)..(1419)
atggccacttctgactccattgttgatgacagaaagcaattgcacgttgctactttcccatggttggcctttggtcacattttgcctttcttgcaattgtctaaattgattgctgaaaagggtcacaaggtttccttcttgtctaccaccagaaacatccaaagattatcttcccacatctctcctttgatcaacgttgttcaattgactctaccacgtgtccaagaattaccagaagacgctgaagctactaccgatgtccacccagaagatatccaatacttgaagaaggctgtcgatggtttgcaaccagaagtcaccagattcttggaacaacactctccagactggatcatctacgacttcactcactactggttgccatccattgctgcttctttgggtatctccagagcttacttctgtgtcatcactccatggaccattgcttacttggctccatcttctgatgctatgattaacgattctgatggtagaaccaccgtcgaagacttgaccactccaccaaaatggttcccattcccaaccaaggtctgttggagaaagcacgacttggccagaatggaaccatacgaagctccaggtatctccgatggttacagaatgggtatggttttcaagggttccgactgtctattattcaaatgttaccatgaatttggtactcaatggttaccattgttggaaactttgcaccaagtcccagttgttccagttggtttgttgcctccagaaatcccaggtgatgaaaaggacgaaacctgggtttccatcaagaaatggttggacggtaagcaaaagggttctgttgtctacgttgctttgggttctgaagctttggtttctcaaactgaagttgtcgaattggctttaggtttggaattgtccggtttgccattcgtctgggcttacagaaagccaaagggtccagctaagtctgactctgttgaattgccagatggtttcgttgaaagaaccagagacagaggtttggtctggacttcttgggctccacaattgagaattttgtcccacgaatctgtctgtggtttcttgactcactgtggttctggttccattgtcgaaggtttgatgttcggtcatccattgatcatgttgccattattcggtgaccaaccattgaacgctagattattggaagacaaacaagtcggtattgaaattccaagaaacgaagaagatggttgtttgaccaaggaatccgttgctcgttctttacgttctgtcgttgtcgaaaacgaaggtgaaatctacaaggccaatgccagagaattgtccaagatctacaacgacaccaaggttgaaaaggaatacgtttctcaatttgtcgactacttggaaaagaacgccagagctgttgccatcgaccacgaatcc

SEQ ID NO: 110 - protein, 473 aa, Stevia rebaudiana
MATSDSIVDDRKQLHVATFPWLAFGHILPFLQLSKLIAEKGHKVSFLSTTRNIQRLSSHISPLINVVQLTLPRVQELPEDAEATTDVHPEDIQYLKKAVDGLQPEVTRFLEQHSPDWIIYDFTHYWLPSIAASLGISRAYFCVITPWTIAYLAPSSDAMINDSDGRTTVEDLTTPPKWFPFPTKVCWRKHDLARMEPYEAPGISDGYRMGMVFKGSDCLLFKCYHEFGTQWLPLLETLHQVPVVPVGLLPPEIPGDEKDETWVSIKKWLDGKQKGSVVYVALGSEALVSQTEVVELALGLELSGLPFVWAYRKPKGPAKSDSVELPDGFVERTRDRGLVWTSWAPQLRILSHESVCGFLTHCGSGSIVEGLMFGHPLIMLPLFGDQPLNARLLEDKQVGIEIPRNEEDGCLTKESVARSLRSVVVENEGEIYKANARELSKIYNDTKVEKEYVSQFVDYLEKNARAVAIDHES

SEQ ID NO: 111 - DNA, 1356 bp, Populus trichocarpa
  CDS (1)..(1356)
atggacgaacctcacgaattgcacattgctatgttcccatggttggcctttggtcacatcattccattcttggaattagccaagttgattgctcaaagaggtcacaagatctctttcatctccactccaagaaacatccaaagattaccaaccatcccaccaaacttgaccccaagaatcaacttagtctctttggctttgccacacgttgaaaacttgccaaacaacgctgaagccactgctgacttgccattcgacaagatcccatacttgaagattgcttacgacagattgcaagactctttgttccatttcttgcactcttcttctccagactggatcatcttcgattttgcctcctactggttaccagaaattgctaccaaattgggtatctccggtgttttgttctccatcttcggtgcttggactttatctttcgctggtccatcttactctgccattttgaacggtgatgacccaagaaccgaaccacaacatttcaccgttccaccaaaatgggtcactttcccatccaaggttgctttccgtatccacgaagctaagagattcttggttcaaatcgaagctaactcttctggtgtcactgacatcttcagatggggttccgttttggctggttgtgatgtcattgccgtcagatcttgtttggaattggaagctgacttcttgagattggtcgaagatttgcactgtaagccagttatcccagtcggtctattaccacctccagctcaatgttctgaaggtggttccagagaaggtggtgtcgacgaaaaatgggttaccatttctgaatggttggacaagcaaactcaaggttccgttgtctacattgctttcggttctgaattgaccatcaaccaaaatgaaatcactgaattggctttgggtttagaattgtctggtttgccattcttctgggctttcagaaacagagatgactccgttagattgccagatggtttcgatgaaagagtcaagggtcgtggtgttgtctggacttcctgggctcctcaattgagaatcatggctcacgaatccgttggtggtttcttgactcactgtggttactcctctgttatcgaagctttgtccttcggtttggctttaatcatgttgccatttgccattgaccaaggtttgattgcccgtgttttcgaaggtaagaaggtcggtattgaagtcccaagagatgaacaagatggttccttcaccagaaactctgttgctgaatctctaagattggtcattgttgacaaggaaggttctgcttacagagaaaacgctaagcaacaaatggttactttgtttggtttgacctacaccatgacg

SEQ ID NO: 112 - protein, 452 aa, Populus trichocarpa
MDEPHELHIAMFPWLAFGHIIPFLELAKLIAQRGHKISFISTPRNIQRLPTIPPNLTPRINLVSLALPHVENLPNNAEATADLPFDKIPYLKIAYDRLQDSLFHFLHSSSPDWIIFDFASYWLPEIATKLGISGVLFSIFGAWTLSFAGPSYSAILNGDDPRTEPQHFTVPPKWVTFPSKVAFRIHEAKRFLVQIEANSSGVTDIFRWGSVLAGCDVIAVRSCLELEADFLRLVEDLHCKPVIPVGLLPPPAQCSEGGSREGGVDEKWVTISEWLDKQTQGSVVYIAFGSELTINQNEITELALGLELSGLPFFWAFRNRDDSVRLPDGFDERVKGRGVVWTSWAPQLRIMAHESVGGFLTHCGYSSVIEALSFGLALIMLPFAIDQGLIARVFEGKKVGIEVPRDEQDGSFTRNSVAESLRLVIVDKEGSAYRENAKQQMVTLFGLTYTMT

SEQ ID NO: 113 - DNA, 1362 bp, Stevia rebaudiana
  CDS (1)..(1362)
atgtccttgaaaggtaacgacaaggaattacatttggtcatgttcccattctttgctttcggtcacatcactccatttgtccaattgtccaacaagatctcctctttgtacccaggtgtcaagatcactttcttggctgcttctgcttctgtttccagaatcgaaaccatgttgaacccatctaccaacaccaaggtcattccattgactttgccaagagtcgatggtctaccagaaggtgttgaaaacactgctgacgcttctccagctaccattggtctattggttgttgccattgatttgatgcaacctcaaatcaagactttattggctaacttgaagccagacttcgttatcttcgacttcgtccactggtggttaccagaaattgcttctgaattgggtatcaagaccatctacttctccgtttacatggccaacattgtcatgccatccacttccaagttgaccggtaacaagccatctaccgtcgaagatatcaaggctttgcaacaatcttacggtattccagttaagactttcgaagccatctctttgatgaacgttttcaagtctttccacgactggatggacaaatgtatcaacggttgtaacttgatgttgatcaagtcttgtcgtgaaatggaaggttccagaattgacgatgtcaccaagcaatctaccagaccagttttcttgattggtccagttgttccagaacctcactctggtgaattggacgaaacctgggctaactggttgaacagattcccagctaagtctgtcatctactgttcctttggttctgaaactttcttgaccgatgaccaaatcagagaattggccttgggtttagaattgactggtttgccattcttcttggtcttgaacttcccagccaatgtcgacaaatctgctgaattgaagagaactttaccagatggtttcttggaaagagttaaggacaagggtattgtccactctggttgggttcaacaaagacacatcttggctcatgactctgttggttgttacgttttccacgctggttacggttccgttatcgaaggtttggtcaatgactgtcaattagtcatgttgccaatgaaggttgaccaattcaccaactccaaggttattgctttggaattgaaggctggtgttgaagttaacagaagagatgaagatggttacttcggtaaggacgatgtcttcgaagctgtcgaatctgtcatgatggacactgaaaacgaaccagccaagtccatcagagaaaaccaccgtaaattgaaggaatttttgcaaaacgatgaaatccaaaagaaatacattgctgatttcgttgaaaacttgaaagcgtta

SEQ ID NO: 114 - protein, 454 aa, Stevia rebaudiana
MSLKGNDKELHLVMFPFFAFGHITPFVQLSNKISSLYPGVKITFLAASASVSRIETMLNPSTNTKVIPLTLPRVDGLPEGVENTADASPATIGLLVVAIDLMQPQIKTLLANLKPDFVIFDFVHWWLPEIASELGIKTIYFSVYMANIVMPSTSKLTGNKPSTVEDIKALQQSYGIPVKTFEAISLMNVFKSFHDWMDKCINGCNLMLIKSCREMEGSRIDDVTKQSTRPVFLIGPVVPEPHSGELDETWANWLNRFPAKSVIYCSFGSETFLTDDQIRELALGLELTGLPFFLVLNFPANVDKSAELKRTLPDGFLERVKDKGIVHSGWVQQRHILAHDSVGCYVFHAGYGSVIEGLVNDCQLVMLPMKVDQFTNSKVIALELKAGVEVNRRDEDGYFGKDDVFEAVESVMMDTENEPAKSIRENHRKLKEFLQNDEIQKKYIADFVENLKAL

SEQ ID NO: 115 - DNA, 1362 bp, Stevia rebaudiana
  CDS (1)..(1362)
atgtccttgaaaggtaacgacaaggaattacatttggtcatgttcccattctttgctttcggtcacatcactccatttgtccaattgtccaacaagatctcctctttgtacccaggtgtcaagatcactttcttggctgcttctgcttctgtttccagaatcgaaaccatgttgaacccatctaccaacaccaaggtcattccattgactttgccaagagtcgatggtctaccagaaggtgttgaaaacactgctgacgcttctccagctaccattggtctattggttgttgccattgatttgatgcaacctcaaatcaagactttattggctaacttgaagccagacttcgttatcttcgacttcgtccactggtggttaccagaaattgcttctgaattgggtatcaagaccatctacttctccgtttacatggccaacattgtcatgccatccacttccaagttgaccggtaacaagccatctaccgtcgaagatatcaaggctttgcaacaatctgacggtattccagttaagactttcgaagccatctctttgatgaacgttttcaagtctttccacgactggatggacaaatgtatcaacggttgtaacttgatgttgatcaagtcttgtcgtgaaatggaaggttccagaattgacgatgtcaccaagcaatctaccagaccagttttcttgattggtccagttgttccagaacctcactctggtgaattggacgaaacctgggctaactggttgaacagattcccagctaagtctgtcatctactgttcctttggttctgaaactttcttgaccgatgaccaaatcagagaattggccttgggtttagaattgactggtttgccattcttcttggtcttgaacttcccagccaatgtcgacaaatctgctgaattgaagagaactttaccagatggtttcttggaaagagttaaggacaagggtattgtccactctggttgggttcaacaaagacacatcttggctcatgactctgttggttgttacgttttccacgctggttacggttccgttatcgaaggtttggtcaatgactgtcaattagtcatgttgccaatgaaggttgaccaattcaccaactccaaggttattgctttggaattgaaggctggtgttgaagttaacagaagagatgaagatggttacttcggtaaggacgatgtcttcgaagctgtcgaatctgtcatgatggacactgaaaacgaaccagccaagtccatcagagaaaaccaccgtaaattgaaggaatttttgcaaaacgatgaaatccaaaagaaatacattgctgatttcgttgaaaacttgaaagcgtta

SEQ ID NO: 116 - protein, 454 aa, Stevia rebaudiana
MSLKGNDKELHLVMFPFFAFGHITPFVQLSNKISSLYPGVKITFLAASASVSRIETMLNPSTNTKVIPLTLPRVDGLPEGVENTADASPATIGLLVVAIDLMQPQIKTLLANLKPDFVIFDFVHWWLPEIASELGIKTIYFSVYMANIVMPSTSKLTGNKPSTVEDIKALQQSDGIPVKTFEAISLMNVFKSFHDWMDKCINGCNLMLIKSCREMEGSRIDDVTKQSTRPVFLIGPVVPEPHSGELDETWANWLNRFPAKSVIYCSFGSETFLTDDQIRELALGLELTGLPFFLVLNFPANVDKSAELKRTLPDGFLERVKDKGIVHSGWVQQRHILAHDSVGCYVFHAGYGSVIEGLVNDCQLVMLPMKVDQFTNSKVIALELKAGVEVNRRDEDGYFGKDDVFEAVESVMMDTENEPAKSIRENHRKLKEFLQNDEIQKKYIADFVENLKAL

SEQ ID NO: 117 - DNA, 1449 bp, Stevia rebaudiana
  CDS (1)..(1449)
atggaccaaatggccaagattgacgaaaagaagcctcacgttgttttcattccattcccagctcaatctcacatcaagtgtatgttgaaattggccagaattttgcaccaaaagggtttgtacatcactttcatcaacactgacaccaaccacgaaagattggttgcctccggtggtactcaatggttggaaaatgctccaggtttctggttcaagaccgtcccagatggtttcggttctgccaaggatgacggtgtcaagccaactgatgctttgagagaattgatggactacttgaagaccaacttcttcgatttgttcttggacttggtcttgaagttggaagttccagctacctgtatcatctgtgatggttgtatgacctttgctaacaccattagagctgctgaaaagttgaacattccagtcatcttattctggaccatggctgcttgtggtttcatggctttctaccaagctaaggtcttaaaggaaaaggaaattgttccagtcaaggacgaaacctacttgaccaatggttacttggacatggaaattgactggatcccaggtatgaagagaatcagattacgtgacttgcctgaattcatcttggccaccaagcaaaactactttgctttcgaattcttgtttgaaactgctcaattagctgacaaggtttctcacatgatcattcacactttcgaagaattggaagcttctttagtctctgaaatcaaatctattttcccaaacgtttacactatcggtccattacaattgttgttgaacaagatcactcaaaaggaaaccaacaacgattcttactctttatggaaggaagaaccagaatgtgtcgaatggttgaactccaaggaaccaaactccgttgtttacgtcaactttggttctttggctgtcatgtctttgcaagatttggtcgaattcggttggggtttggttaactccaaccattacttcttatggatcatcagagctaacttgattgacggtaagccagctgtcatgccacaagaattgaaggaagccatgaacgaaaaaggtttcgttggttcttggtgttcccaagaagaagttttgaaccatccagccgttggtggtttcttgactcactgtggctggggttccatcattgaatctctatccgctggtgttccaatgttgggttggccatccattggtgaccaaagagccaactgtcgtcaaatgtgtaaggaatgggaagttggtatggaaatcggtaagaacgttaagagagatgaagtcgaaaaattagtcagaatgttgatggaaggtttggaaggtgaaagaatgagaaagaaggctttggaatggaagaaatctgctactttggctacttgttgtaacggttcctcttctttggatgttgaaaaattggctaacgaaatcaagaaattgtccaggaac

SEQ ID NO: 118 - protein, 483 aa, Stevia rebaudiana
MDQMAKIDEKKPHVVFIPFPAQSHIKCMLKLARILHQKGLYITFINTDTNHERLVASGGTQWLENAPGFWFKTVPDGFGSAKDDGVKPTDALRELMDYLKTNFFDLFLDLVLKLEVPATCIICDGCMTFANTIRAAEKLNIPVILFWTMAACGFMAFYQAKVLKEKEIVPVKDETYLTNGYLDMEIDWIPGMKRIRLRDLPEFILATKQNYFAFEFLFETAQLADKVSHMIIHTFEELEASLVSEIKSIFPNVYTIGPLQLLLNKITQKETNNDSYSLWKEEPECVEWLNSKEPNSVVYVNFGSLAVMSLQDLVEFGWGLVNSNHYFLWIIRANLIDGKPAVMPQELKEAMNEKGFVGSWCSQEEVLNHPAVGGFLTHCGWGSIIESLSAGVPMLGWPSIGDQRANCRQMCKEWEVGMEIGKNVKRDEVEKLVRMLMEGLEGERMRKKALEWKKSATLATCCNGSSSLDVEKLANEIKKLSRN

SEQ ID NO: 119 - DNA, 1404 bp, Stevia rebaudiana
  CDS (1)..(1404)
atgccaatctccgatatcaatgctggttcccacattttggttttcccatacccagctcaaggtcacatgttgactctattagatttgacccaccaattggccatcagaaacttgactatcactatcttagtcaccccaaagaacttgccaaccatttctccattgttggctgctcatccaaccactgtttctgctttgttgttgccattaccacctcacccagccatcccatctggtattgaaaacgtcaaggacttgccaaacgatgctttcaaggctatgatggttgctttaggtgacttgtacaacccattgagagactggttcagaaaccaacctaacccaccagttgccatcatttctgacttcttcttgggttggactcaccacttggctgtcgaattaggtatcagaagatacactttctctccatctggtgctttggctttgtccgtcattttctctttatggagataccaaccaaagagaatcgatgtcgaaaacgaaaaggaagctatcaaattcccaaagattccaaactctccagaatacccatggtggcaattatctccaatctacagatcttacgttgaaggtgacccagattctgaattcatcaaggatggtttcttggctgatattgcttcctggggtattgtcatcaactctttcaccgaattggaacaagtctacgttgaccatttgaagcatgaattgggtcacgaccaagtctttgctgtcggtccattattgcctccaggtgacaagacttctggtagaggtggttcttcttccaacgatgtcttgtcctggttggacacctgtgctgacagaaccgttgtctacgtttgtttcggttctcaaatggttttgaccaacggtcaaatggaagttgttgctttgggtttggaaaagtcccgtgtcaaatttgtctggtccgtcaaggaaccaactgttggtcacgaagctgctaactacggtcgtgttccaccaggtttcgaagacagagtttccggtcgtggtttggttatcagaggttgggttccacaagttgccattttgtctcacgactccgttggtgttttcttgacccactgtggttggaactctgtcatggaagctgttgctgctgaagttttgatgttgacctggccaatgtccgctgaccaattctccaatgccactttgttgcacgaattgaaggttggtatcaaggtttgtgaaggttccaacattgtcccaaactctgacgaattggctgaattgttctccaaatctctatccgatgaaactagattggaaagaaagagagtcaaggaatttgccaaatctgccaaggaagccgtcggtccaaagggttcctctgtcggtgaattagaaagattggttgacaacttgtctttg

SEQ ID NO: 120 - protein, 468 aa, Stevia rebaudiana
MPISDINAGSHILVFPYPAQGHMLTLLDLTHQLAIRNLTITILVTPKNLPTISPLLAAHPTTVSALLLPLPPHPAIPSGIENVKDLPNDAFKAMMVALGDLYNPLRDWFRNQPNPPVAIISDFFLGWTHHLAVELGIRRYTFSPSGALALSVIFSLWRYQPKRIDVENEKEAIKFPKIPNSPEYPWWQLSPIYRSYVEGDPDSEFIKDGFLADIASWGIVINSFTELEQVYVDHLKHELGHDQVFAVGPLLPPGDKTSGRGGSSSNDVLSWLDTCADRTVVYVCFGSQMVLTNGQMEVVALGLEKSRVKFVWSVKEPTVGHEAANYGRVPPGFEDRVSGRGLVIRGWVPQVAILSHDSVGVFLTHCGWNSVMEAVAAEVLMLTWPMSADQFSNATLLHELKVGIKVCEGSNIVPNSDELAELFSKSLSDETRLERKRVKEFAKSAKEAVGPKGSSVGELERLVDNLSL

SEQ ID NO: 121 - DNA, 1383 bp, Stevia rebaudiana
  CDS (1)..(1383)
atggaatcttccaaggtcattttgtacccatctccaggtattggtcacttggtttccatggtcgaattgggtaaattgattcacacccaccacccatctctatccgtcatcatcttggttttgccagctacctacgaaactggttccaccaccacctacatcaacactgtttctaccaccactccattcatcactttccaccacttgccagtcattccattgccaccagactcctcttctgaatttatcgatttggctttcgacattccacaattatacaacccagttgtctacaacactttggttgccatctctgaaacttccaccatcaaggctgttatcttggacttctttgtcaacgccgctttccaaatctccaagtctttggacttgccaacctactacttcttcacttctggtgcttctggtctatgtgctttcttgcatttgccaactatctacaagacctactccggtaacttcaaggacttggacactttcatcaacattccaggtgttcctcctatccactcttctgacatgccaaccgtcttattcgacaaggaatccaactcttacaagaactttgtcaagacttccaacaacatggccaaatcttctggtgtcattgctaactccttcttgcaattggaagaaagagctgctcaaactttgagagatggtaagtccatcaccgatggtccatctccaccaatctacttgattggtccattgatcgcttctggtaaccaagttgaccataatgaaaacgaatgtttgaaatggttaaacactcaaccatccaaatctgttgttttcttgtgtttcggttctcaaggtgttttcaagaaggaacaattgaaggaaattgctgttggtttggaaagatctggtcaaagattcttatgggttgtcagaaagcctccatctgatggtggtaaggaattcggtttggatgacgtcttgccagaaggtttcgttgccagaaccaaggaaaagggtttggttgtcaagaactgggctccacaaccagctattttgggtcacgaatctgtcggtggtttcgtttcccactgtggttggaactcttctttggaagccgttgttttcggtgtcccaatggttgcttggccattatacgctgaacaaaagatgaaccgtgtctacttggtcgaagaaatcaaggttgctttatggttaagaatgtccgctgatggttttgtctctgctgaagctgttgaagaaactgtcagacaattgatggacggtagaagagttcgtgaaagaattttggaaatgtccaccaaggccaaggccgctgtcgaagatggtggttcttccagagttgacttcttcaaattgactgaatcctggacccacaag

SEQ ID NO: 122 - protein, 461 aa, Stevia rebaudiana
MESSKVILYPSPGIGHLVSMVELGKLIHTHHPSLSVIILVLPATYETGSTTTYINTVSTTTPFITFHHLPVIPLPPDSSSEFIDLAFDIPQLYNPVVYNTLVAISETSTIKAVILDFFVNAAFQISKSLDLPTYYFFTSGASGLCAFLHLPTIYKTYSGNFKDLDTFINIPGVPPIHSSDMPTVLFDKESNSYKNFVKTSNNMAKSSGVIANSFLQLEERAAQTLRDGKSITDGPSPPIYLIGPLIASGNQVDHNENECLKWLNTQPSKSVVFLCFGSQGVFKKEQLKEIAVGLERSGQRFLWVVRKPPSDGGKEFGLDDVLPEGFVARTKEKGLVVKNWAPQPAILGHESVGGFVSHCGWNSSLEAVVFGVPMVAWPLYAEQKMNRVYLVEEIKVALWLRMSADGFVSAEAVEETVRQLMDGRRVRERILEMSTKAKAAVEDGGSSRVDFFKLTESWTHK

SEQ ID NO: 123 - DNA, 1455 bp, Stevia rebaudiana
  CDS (1)..(1455)
atgtacaacgttacttaccatcaaaactccaaggccatggctacctctgactccattgtcgacgacagaaagcaattgcacgttgccactttcccatggttggctttcggtcacatcttgccattcttgcaattgtccaaattgattgctgaaaagggtcacaaagtctctttcttgtctaccaccagaaacatccaaagattgtcctctcacatctctccattgattaacgttgtccaattgactttaccaagagtccaagaattgccagaagatgctgaagctactactgatgttcacccagaagatatccaatacttgaagaaggctgtcgatggtttgcaaccagaagttaccagattcttggaacaacactctccagactggatcatctacgacttcactcactactggttaccatccattgctgcttctttgggtatctccagagcttacttctgtgttatcactccatggaccattgcttacttggctccatcttctgatgccatgatcaacgactctgatggtagaaccactgttgaagatttgaccaccccacctaaatggttcccattcccaaccaaggtctgttggagaaagcatgatttggccagaatggaaccatacgaagctccaggtatctctgacggttacagaatgggtatggttttcaagggttctgactgtttgttgttcaaatgttaccatgaattcggtactcaatggttacctctattagaaactttgcaccaagttccagttgttccagtcggtttgttgcctccagaaatcccaggtgacgaaaaggacgaaacctgggtttccatcaagaaatggttggatggtaagcaaaagggttccgttgtctacgttgctttaggttctgaagctttagtctctcaaactgaagttgtcgaattggctttgggtttggaattgtccggtttgccatttgtctgggcttacagaaagccaaagggtccagccaagtctgattctgtcgaattaccagatggtttcgtcgaaagaacccgtgaccgtggtttggtctggacttcctgggctccacaattgagaattttgtcccacgaatctgtctgtggtttcttgactcactgtggttctggttccattgttgaaggtttgatgttcggtcacccattgatcatgttgccaatcttctgtgaccaaccattaaacgctagattgttggaagacaagcaagtcggtattgaaattccaagaaacgaagaagacggttgtttgaccaaggaatccgttgccagatctttgagatctgttgttgtcgaaaacgaaggtgaaatctacaaggctaacgctcgtgctctatccaagatctacaacgacaccaaggtcgaaaaggaatacgtttctcaatttgttgactacttggaaaagaacgccagagctgttgccattgaccacgaaagt

SEQ ID NO: 124 - protein, 485 aa, Stevia rebaudiana; identical to SEQ ID NO: 108

SEQ ID NO: 125 - DNA, 1485 bp, Stevia rebaudiana
  CDS (1)..(1485)
atgtctccaaagatggttgctccaccaaccaacttgcacttcgtcttattcccattgatggctcaaggtcacttggttccaatggtcgacattgctagaattttggctcaaagaggtgctaccgtcaccatcatcaccactccataccatgccaacagagtcagaccagttatctccagagccattgctaccaacttgaaaatccaattgttggaattgcaattgagatccactgaagctggtttgccagaaggttgtgaatctttcgaccaattgccatctttcgaatactggaagaacatctccactgccattgacttgttgcaacaaccagctgaagatctattgagagaattgtctccacctccagactgtatcatctccgatttcttgttcccatggaccactgatgtcgccagaagattgaacattccaagattggttttcaacggtccaggttgtttctacttgttgtgtatccacgttgccatcacttctaacatcttaggtgaaaacgaacctgtttcctccaacactgaaagagttgttttgccaggtttaccagatcgtattgaagttaccaaattgcaaatcgtcggttcttccagaccagctaacgttgacgaaatgggttcctggttaagagctgtcgaagctgaaaaggcttctttcggtattgtcgtcaacacctttgaagaattggaaccagaatacgtcgaagaatacaagaccgtcaaggacaagaagatgtggtgtatcggtccagtttctctatgtaacaagactggtccagacttggctgaaagaggtaacaaggctgccatcaccgaacacaactgtttgaaatggttggatgaaagaaagttgggttctgtcttgtacgtttgtttgggttctttggccagaatctccgctgctcaagccattgaattaggtttaggtttggaatctatcaacagaccatttatctggtgtgttagaaacgaaactgatgaattgaagacttggttcttggacggtttcgaagaaagagttcgtgacagaggtttgattgttcacggttgggctccacaagttttgatcttatctcacccaaccattggtggtttcttgactcactgtggttggaactctaccattgaatccatcactgctggtgttccaatgatcacctggccattctttgctgaccaattcttgaatgaagctttcatcgttgaagttttgaaaattggtgtcagaatcggtgttgaaagagcttgtttgttcggtgaagaagacaaggtcggtgtcttagtcaagaaggaagatgttaagaaggctgttgaatgtttgatggacgaagatgaagacggtgaccaaagaagaaagcgtgtcattgaattggccaagatggctaagattgctatggctgaaggtggttcttcttacgaaaacgtttcctctttgatcagagatgtcactgaaactgtccgtgctcctcat

SEQ ID NO: 126 - protein, 495 aa, Stevia rebaudiana
MSPKMVAPPTNLHFVLFPLMAQGHLVPMVDIARILAQRGATVTIITTPYHANRVRPVISRAIATNLKIQLLELQLRSTEAGLPEGCESFDQLPSFEYWKNISTAIDLLQQPAEDLLRELSPPPDCIISDFLFPWTTDVARRLNIPRLVFNGPGCFYLLCIHVAITSNILGENEPVSSNTERVVLPGLPDRIEVTKLQIVGSSRPANVDEMGSWLRAVEAEKASFGIVVNTFEELEPEYVEEYKTVKDKKMWCIGPVSLCNKTGPDLAERGNKAAITEHNCLKWLDERKLGSVLYVCLGSLARISAAQAIELGLGLESINRPFIWCVRNETDELKTWFLDGFEERVRDRGLIVHGWAPQVLILSHPTIGGFLTHCGWNSTIESITAGVPMITWPFFADQFLNEAFIVEVLKIGVRIGVERACLFGEEDKVGVLVKKEDVKKAVECLMDEDEDGDQRRKRVIELAKMAKIAMAEGGSSYENVSSLIRDVTETVRAPH

SEQ ID NO: 127 - DNA, 1272 bp, Stevia rebaudiana
  CDS (1)..(1272)
atgttgcaattggctacctacttgcactctcaaggtatctccatcactattgctcaatacccaaacttcaactctccagactcctccaaccacccagaattgactttcttaccattatcttccggtaacttgtccgttgctgatatctctggtggtttcttcaaattcattcaaaccttgaaccacaactgtaagcctcacttcagagaatacttggttcaaaacatgtcctctgatgacaaggaatccattgtcatcatcagagacaacttgatgttctttgctggtgaaatcgctggtgaattaggtttaccatctatcatcttgagaggttctaacgctgtcatgttgactgcttccgatatcattccacaattgcaccaagaaggtagattcccaccaccagactctctattgcaagaaaccattccagaattggttccattcagatacaaggacttgccattcatcggttacccaattcaccaaaccttggaattctccattaccatgatgaccccaaagtctccagcttctgccatcttgatcaacactttagaattcttggaacaatctgctttgactcaaatccgtgaccactacaaggtcccagttttcactatcggtccattgcacaagattgtcactaccagatccacttccatcttggaagaagacacctcttgtatcaactggttggacaagcaatctccaaagtctgttgtctacgtttctctaggttctttggccaaattggacgaaaaggttgcttctgaaatggcttgtggtttggccatgtccaaccataaattcttatgggttgtcagaccaggtatggtccatggtttcgaatgggttgaatttttgccagactctttggttggtgaaatgaaggccagaggtttgattgtcaaatgggctccacaaaccactgttttggctcacaacgctgtcggtggtttttggtcccactgtggttggaactctactatcgaatgtttggctgaaggtgttccaatgatgtgtcaacctttcttcgctgaccaattgttgaatgctcgttacgtttccgatgtctggaagaccggtttcgaaattgtcattgaaaagggtgaaattgcttgtgccatcaagagagttttggtcgatgaagaaggtgaagaaatgagacaaagagctatggaaatcaaggaaaaggtcaagattgccatcaacgatggtggttcttcttacgactctttcaaggatttggttgctttcatctcctctttg

SEQ ID NO: 128 - protein, 424 aa, Stevia rebaudiana
MLQLATYLHSQGISITIAQYPNFNSPDSSNHPELTFLPLSSGNLSVADISGGFFKFIQTLNHNCKPHFREYLVQNMSSDDKESIVIIRDNLMFFAGEIAGELGLPSIILRGSNAVMLTASDIIPQLHQEGRFPPPDSLLQETIPELVPFRYKDLPFIGYPIHQTLEFSITMMTPKSPASAILINTLEFLEQSALTQIRDHYKVPVFTIGPLHKIVTTRSTSILEEDTSCINWLDKQSPKSVVYVSLGSLAKLDEKVASEMACGLAMSNHKFLWVVRPGMVHGFEWVEFLPDSLVGEMKARGLIVKWAPQTTVLAHNAVGGFWSHCGWNSTIECLAEGVPMMCQPFFADQLLNARYVSDVWKTGFEIVIEKGEIACAIKRVLVDEEGEEMRQRAMEIKEKVKIAINDGGSSYDSFKDLVAFISSL

SEQ ID NO: 129 - DNA, 1422 bp, Stevia rebaudiana
  CDS (1)..(1422)
atgtctacctctgaattggttttcattccatctccaggtgctggtcatttgccaccaactgttgaattggccaaattgttgttgcaccgtgaccaaagattgtctgtcaccatcattgtcatgaacttatggttaggtccaaagcacaacactgaagccagaccatgtgttccttccttgagattcgtcgatatcccatgtgacgaatctaccatggctttgatctctccaaacactttcatctctgcctttgtcgaacaccacaagccaagagttcgtgacatcgttcgtggtatcattgaatctgactctgtcagattggctggtttcgtcttggacatgttctgtatgccaatgtccgatgttgctaacgaatttggtgttccatcttacaactacttcacctctggtgctgccactttaggtttgatgttccatttgcaatggaagagagatcacgaaggttacgacgctactgaattgaagaactctgacactgaattatctgtcccatcttacgttaaccctgttccagccaaggtcttgccagaagttgttttggacaaggaaggtggttccaagatgttcttggatttggctgaaagaatcagagaatccaagggtatcatcgttaactcttgtcaagctattgaaagacacgctttggaatacctatcctccaacaacaacggtattccacctgttttcccagtcggtccaatcttgaacttggaaaacaagaaggacgatgctaagactgacgaaatcatgagatggttgaacgaacaaccagaatcctctgttgttttcttgtgtttcggttccatgggttctttcaacgaaaagcaagtcaaagaaattgctgttgccattgaaagatctggtcacagatttttatggtctttgagaagaccaactccaaaggaaaagattgaattcccaaaggaatacgaaaacttggaagaagtcttaccagaaggtttcttgaagagaacctcttctatcggtaaggttatcggttgggctccacaaatggctgtcttgtcccacccatccgtcggtggtttcgtttcccactgtggttggaactccactttggaatccatgtggtgtggtgtcccaatggctgcttggccattatacgctgaacaaactttgaatgctttcttgttggttgtcgaattgggtttggctgctgaaattagaatggactacagaaccgataccaaggctggttacgatggtggtatggaagtcaccgttgaagaaattgaagacggtatcagaaagttgatgtctgacggtgaaatcagaaacaaggtcaaggatgtcaaggaaaaatccagagctgccgttgttgagggtggttcttcttacgcttccattggtaaattcatcgaacacgtttccaacgtcaccata

SEQ ID NO: 130 - protein, 474 aa, Stevia rebaudiana
MSTSELVFIPSPGAGHLPPTVELAKLLLHRDQRLSVTIIVMNLWLGPKHNTEARPCVPSLRFVDIPCDESTMALISPNTFISAFVEHHKPRVRDIVRGIIESDSVRLAGFVLDMFCMPMSDVANEFGVPSYNYFTSGAATLGLMFHLQWKRDHEGYDATELKNSDTELSVPSYVNPVPAKVLPEVVLDKEGGSKMFLDLAERIRESKGIIVNSCQAIERHALEYLSSNNNGIPPVFPVGPILNLENKKDDAKTDEIMRWLNEQPESSVVFLCFGSMGSFNEKQVKEIAVAIERSGHRFLWSLRRPTPKEKIEFPKEYENLEEVLPEGFLKRTSSIGKVIGWAPQMAVLSHPSVGGFVSHCGWNSTLESMWCGVPMAAWPLYAEQTLNAFLLVVELGLAAEIRMDYRTDTKAGYDGGMEVTVEEIEDGIRKLMSDGEIRNKVKDVKEKSRAAVVEGGSSYASIGKFIEHVSNVTI

SEQ ID NO: 131 - DNA, 1437 bp, Stevia rebaudiana
  CDS (1)..(1437)
atggcctccattgctgaaatgcaaaagcctcatgccatctgtatcccatacccagctcaaggtcacatcaacccaatgatgcaatttgccaaattgttgcacttcaagggtttccacatctctttcgttaacaaccattacaaccacaagagattacaaagatctagaggtctatccgctttggaaggtttgccagacttccacttctactccatcccagatggtttgcctccatctaacgctgaagctactcaatccattccaggtctatgtgaatctattccaaagcactctttggaaccattctgtgacttgattgccactttgaatggttctgatgttccaccagtctcctgtatcatctctgacggtgtcatgtctttcactttgcaagctgctgaaagattcggtttaccagaagtcttattctggactccatctgcttgtggtttcttggcttacactcactacagagatttggttgacaaagaatacattccattgaaggacaccaatgatttgaccaacggttacttggaaacttctttggactggatcccaggtatgaagaacatcagattaaaggacttcccatctttcatcagaaccaccgatatcaacgatatcatgttgaactacttcttgattgaaactgaagccattccaaagggtgttgccatcatcttgaacactttcgatgctttggaaaaggactctatcactccagtcttggctttgaaccctcaaatctacaccatcggtccattgcacatgatgcaacaatacgtcgaccatgatgaaagattgaagcacattggttccaacttatggaaggaagacgtttcttgtatcaactggttggacaccaagaagccaaactccgttgtctacgtcaactttggttccatcactgttatgaccaaggaacaattgattgaattcggttggggtttggctaactctaagaaggacttcttatggatcaccagaccagacattgttggtggtaacgaagctatgattccagctgaattcattgaagaaaccaaggaaagaggtatggttacttcctggtgttcccaagaagaagttttgaagcacccatccattggtgttttcttgacccactctggttggaactccaccattgaatccatctctaacggtgttccaatgatctgttggccattcttcgctgaacaacaaaccaactgtcgttactgttgtgtcgaatgggaaatcggtttggaaattgacactgacgtcaagcgtgaagaagttgaagctcaagttagagaaatgatggatggttctaagggtaagatgatgaaaaacaaggctttggaatggaagaagaaggctgaagaagctgtctctattggtggttcttcttacttgaactttgaaaaattggtcaccgatgtcttgttgcgcaaa

SEQ ID NO: 132 - protein, 479 aa, Stevia rebaudiana
MASIAEMQKPHAICIPYPAQGHINPMMQFAKLLHFKGFHISFVNNHYNHKRLQRSRGLSALEGLPDFHFYSIPDGLPPSNAEATQSIPGLCESIPKHSLEPFCDLIATLNGSDVPPVSCIISDGVMSFTLQAAERFGLPEVLFWTPSACGFLAYTHYRDLVDKEYIPLKDTNDLTNGYLETSLDWIPGMKNIRLKDFPSFIRTTDINDIMLNYFLIETEAIPKGVAIILNTFDALEKDSITPVLALNPQIYTIGPLHMMQQYVDHDERLKHIGSNLWKEDVSCINWLDTKKPNSVVYVNFGSITVMTKEQLIEFGWGLANSKKDFLWITRPDIVGGNEAMIPAEFIEETKERGMVTSWCSQEEVLKHPSIGVFLTHSGWNSTIESISNGVPMICWPFFAEQQTNCRYCCVEWEIGLEIDTDVKREEVEAQVREMMDGSKGKMMKNKALEWKKKAEEAVSIGGSSYLNFEKLVTDVLLRK

SEQ ID NO: 133 - DNA, 1374 bp, Stevia rebaudiana
  CDS (1)..(1374)
atggaaaacaagactgaaactaccgttcgtcgtagaagaagaatcatcttattcccagttccagttcaaggtcacatcaacccaattttgcaattggctaacgtcttatactccaagggtttctccatcactattttccacactaacttcaacaagccaaagacctccaactacccacacttcaccttcagatttattttggacaatgaccctcaagatgtcagaatctccaacttgccaactcacggtccattgaccgtcatgagaattttgatcatcaacgaacacggtgctgatgaattgcaaagagaattggaattgttgatgttggcctccgaagaagacggtgaagtctcctgtttgattaccgaccaaatctggtacttcacccaatctgttgctgactctttgaacttgagaagattggttttgatgacttcttctttgttcaacttccacgctcatgtttctttgcctcaattcgatgaattgggttacttggacccagacgacaagactagattagaagaacaagcttctggtttcccaatgttgaaggtcaaggatatcaaatgtggtttctctatgtggaagcaaggtaaggaaatctttgaaaacatcaccaagcaaaccaaggcttcttctggtgtcatctggaactctttcaaggaattggaagaatctgaattggaaaccgtcatcagagaaatcccagctccatccttcttgattccattgccaaagcatttgactgcttcctcttcttctctattagaccacgacagaactgttttcccatggttagaccaacaaccatctcgttctgtcttgtacgtttctttcggttctgctactgaagtcgatgctaaggacttcttggaaattgctcgtggtttggtcgactccaagcaatctttcttatgggttgttagaccaggtttcgtcaagggttccacctgggttgaaccattgccagatggtttcttgggtgaaagaggtagaattgtcaaatgggttccacaacaagaagttttggctcacggtgccattggtgctttctggacccactctggttggaactccactttggaatccgtttgtgaaggtgttccaatgattttctctgcctttgcctttgaccaaccattaaacgctagatacatgtccgatgtcttgaaggttggtgtctacttggaaaacggttgggaaagaggtgaaattgccaacgccatcagaagagttatggtcgatgaagaaggtggttacatcagacaaaacgcttccgtcttgaagcaaaaggctgatgtttccttgatgaagggtggttcttcttacgaatctctagaatctttggttgcttacatctccagctta

SEQ ID NO: 134 - protein, 458 aa, Stevia rebaudiana
MENKTETTVRRRRRIILFPVPVQGHINPILQLANVLYSKGFSITIFHTNFNKPKTSNYPHFTFRFILDNDPQDVRISNLPTHGPLTVMRILIINEHGADELQRELELLMLASEEDGEVSCLITDQIWYFTQSVADSLNLRRLVLMTSSLFNFHAHVSLPQFDELGYLDPDDKTRLEEQASGFPMLKVKDIKCGFSMWKQGKEIFENITKQTKASSGVIWNSFKELEESELETVIREIPAPSFLIPLPKHLTASSSSLLDHDRTVFPWLDQQPSRSVLYVSFGSATEVDAKDFLEIARGLVDSKQSFLWVVRPGFVKGSTWVEPLPDGFLGERGRIVKWVPQQEVLAHGAIGAFWTHSGWNSTLESVCEGVPMIFSAFAFDQPLNARYMSDVLKVGVYLENGWERGEIANAIRRVMVDEEGGYIRQNASVLKQKADVSLMKGGSSYESLESLVAYISSL

SEQ ID NO: 135 - DNA, 1377 bp, Stevia rebaudiana
  CDS (1)..(1377)
atggaaaacaagactgaaactactgtcagaagaagacgtcgtatcatcttgttcccagttccattccaaggtcacatcaacccaatgttacaattagctaacgtcttgtactccaagggtttctccatcaccattttccacaccaacttcaacaagccaaagacttctaactacccacacttcactttcagatttatcttggacaacgaccctcaagatgtcagaatttccaacttgccaacccacggtccattggctgtcatgagaattttgatcatcaacgaacacggtgccgacgaattgagaagagaattggaattgttgatgttggcttctgaagaagatggtgaagtttcctgtttgattgctgaccaaatctggtacttcacccaatctgttgctgactctttgaacttgagaagattggtcttggtcacttcttctttgttcaacttccacgctcatgtctctttgccacaatttgacgaattgggttacttggacccagatgacaagaccagattggaagaacaagcttctggtttcccaatgttgaaggttaaggatatcaaatgttctttctccatgtggaagaaatacaaggaatactttgaaaacatcaccaagcaaaccaaggcctcctccggtgttatctggaactctttcaaggaattagaagaatctgaattggaaactgttatcagagaaattccagctccatctttcttaatcccattaccaaagcatttgactgcttcttcttcctctttgttggaccacgacagaaccgttttcccatggttggaccaacaaccatccagatctgtcttgtacgtttctttcggttctggtactgaagtcttagatgaaaaggacttcttggaaattgccagaggtttagtcgactccaagcaatctttcttgtgggttgttagaccaggtttcgtcaagggttccacctgggttgaaccattgccagatggtttcttgggtgaaagaggtagaattgtcaaatgggttcctcaacaagaagttttggctcacggtgccattggtgctttctggacccactctggttggaactccactttggaatctgtttgtgaaggtgttccaatgattttctccgatttcggtctagaccaaccattgaacgctcgttacatgtccgatgttttgaaggttggtgtctacttggaaaacggttgggaaagaggtgaaattgctaacgccatcagaagagtcatggttgacgaagaaggtgaatacatcagacaaaatgctcgtgtcttgaaacaaaaggctgatgtttctttgatgaagggtggttcttcttacgaatccttggaatctttagtctcttacatctcctcctta

SEQ ID NO: 136 - protein, 459 aa, Stevia rebaudiana
MENKTETTVRRRRRIILFPVPFQGHINPMLQLANVLYSKGFSITIFHTNFNKPKTSNYPHFTFRFILDNDPQDVRISNLPTHGPLAVMRILIINEHGADELRRELELLMLASEEDGEVSCLIADQIWYFTQSVADSLNLRRLVLVTSSLFNFHAHVSLPQFDELGYLDPDDKTRLEEQASGFPMLKVKDIKCSFSMWKKYKEYFENITKQTKASSGVIWNSFKELEESELETVIREIPAPSFLIPLPKHLTASSSSLLDHDRTVFPWLDQQPSRSVLYVSFGSGTEVLDEKDFLEIARGLVDSKQSFLWVVRPGFVKGSTWVEPLPDGFLGERGRIVKWVPQQEVLAHGAIGAFWTHSGWNSTLESVCEGVPMIFSDFGLDQPLNARYMSDVLKVGVYLENGWERGEIANAIRRVMVDEEGEYIRQNARVLKQKADVSLMKGGSSYESLESLVSYISSL

SEQ ID NO: 137 - DNA, 1419 bp, Stevia rebaudiana
  CDS (1)..(1419)
atggctacttctgactccattgtcgatgacagaaagcaattgcacgttgccactttcccatggttggctttcggtcacattttgccattcttgcaattgtccaaattgattgctgaaaagggtcacaaggtttctttcttgtccactaccagaaacatccaaagattatcttctcacatctctccattgatcaacgttgtccaattgactttgccaagagtccaagaattgccagaagatgctgaagctaccaccgatgtccacccagaagatatccaatacttgaagaaggctgtcgatggtttgcaaccagaagtcaccagattcttggaacaacactctccagactggatcatctacgacttcacccactactggttaccatccattgctgcttctttgggtatctccagagcttacttctgtgtcatcactccatggaccattgcttacttggctccatcttctgatgccatgatcaacgactctgacggtagaaccactgttgaagatttgaccactccacctaaatggttcccattcccaaccaaggtttgttggagaaagcatgacttggccagaatggaaccttacgaagctccaggtatttctgatggttacagaatgggtatggttttcaagggttctgactgtctattattcaaatgttaccatgaattcggtactcaatggttgccattgttggaaactttgcaccaagttccagttgttccagtcggtttgttgccaccagaaattccaggtgatgaaaaggatgaaacctgggtttccatcaagaaatggttggacggtaagcaaaagggttccgttgtctacgttgctttgggttctgaagctttggtttctcaaactgaagttgtcgaattggctttgggtctagaattgtccggtttaccatttgtctgggcttacagaaagccaaagggtccagccaaatctgattccgtcgaattaccagacggtttcgtcgaaagaacccgtgaccgtggtttagtctggacttcctgggctccacaattgagaatcttgtcccacgaatccgtttgtggtttcttgactcactgtggttctggttctattgtcgaaggtttgatgttcggtcacccattgattatgttgcctttgtttggtgaccaaccattaaacgctagattattggaagacaagcaagtcggtatcgaaattccaagaaacgaagaagacggttgtttgaccaaggaatccgttgctcgttctttgagatccgttgttgtcgaaaacgaaggtgaaatctacaaggccaacgccagagaattgtctaagatctacaacgacaccaaggttgaaaaggaatacgtttctcaatttgtcgactacttggaaaagaacgctagagctgttgccatcgaccacgaaagc

SEQ ID NO: 138 - protein, 473 aa, Stevia rebaudiana; identical to SEQ ID NO: 110

SEQ ID NO: 139 - DNA, 1419 bp, Stevia rebaudiana
  CDS (1)..(1419)
atggctacctctgactccattgtcgatgaccgtaaacaattgcacgttgctactttcccatggttggctttcggtcacatcttgccttacttgcaattgtccaagttgattgctgaaaagggtcacaaggtttctttcttgtccactactagaaacatccaaagattatcttctcacatctctccattgatcaacgttgtccaattgactttgccaagagttcaagaattaccagaagatgctgaagctaccaccgatgtccacccagaagacattccatacttgaagaaggcctctgacggtttgcaaccagaagtcactagattcttggaacaacactctccagactggatcatctacgactacactcactactggttgccatccattgctgcttctttgggtatctccagagcccatttctccgtcaccactccatgggctattgcttacatgggtccatctgctgatgctatgatcaacggttctgacggtagaaccaccgtcgaagatttgactaccccacctaaatggttcccattcccaaccaaggtttgttggagaaagcatgatttggccagattagtcccatacaaggctccaggtatttctgatggttacagaatgggtttggtcttgaaaggttctgactgtttgttgtccaaatgttaccacgaattcggtactcaatggttaccattgttggaaactttgcaccaagttccagttgttccagtcggtttgttgcctccagaagttccaggtgacgaaaaggatgaaacctgggtttccatcaagaaatggttggatggtaagcaaaagggttccgttgtctacgttgctttgggttctgaagtcttggtcagccaaactgaagttgtcgaattggctttaggtttggaattgtccggtctaccatttgtctgggcttacagaaagccaaagggtccagctaagtctgactccgttgaattgccagatggtttcgtcgaaagaaccagagacagaggtttggtttggacttcttgggctccacaattgagaatcttatctcacgaatctgtttgtggtttcttgacccactgtggttctggttccatcgtcgaaggtttgatgttcggtcacccattaatcatgttgccaattttcggtgaccaaccattgaacgccagattattggaagacaagcaagtcggtattgaaattccaagaaacgaagaagatggttgtttgaccaaggaatccgttgccagatctctacgttctgttgttgtcgaaaaggaaggtgaaatctacaaggccaacgctcgtgaattatccaagatctacaacgacaccaaggttgaaaaggaatacgtttctcaatttgttgactacttggaaaagaacactagagctgttgccattgaccatgagtct

SEQ ID NO: 140 - protein, 473 aa, Stevia rebaudiana; identical to SEQ ID NO: 106

SEQ ID NO: 141 - DNA, 2361 bp, Stevia rebaudiana
atgaaaaccggtttcatctctcccgccactgttttccaccaccgaatctcccccgccaccaccttccgacaccacctctcccctgccaccaccaactccactggtattgttgctctgcgagacatcaacttccgatgcaaggctgtttccaaggagtactccgatctgctccagaaggacgaggcctctttcaccaagtgggacgacgacaaggtcaaggaccacctcgacaccaacaagaacctctaccccaacgacgagatcaaggagtttgtcgagtccgtcaaggccatgttcggctccatgaacgacggcgagattaatgtctctgcttacgacaccgcctgggttgctctggtccaggatgtcgacggttccggctctcctcagttcccttcctctctcgagtggatcgccaacaaccagctgtccgacggttcttggggtgaccacctgctcttctctgctcacgaccgaatcatcaacaccctggcctgtgtcattgctctgacctcttggaacgtccacccctccaagtgcgagaagggtctgaacttcctccgagagaacatctgcaagctcgaggacgagaacgccgagcacatgcccattggcttcgaggtcaccttcccctctctgattgacattgccaagaagctcaacattgaggtccccgaggacacccccgctctcaaggagatctacgctcgacgagacatcaagctcaccaagatccccatggaggttctccacaaggtccccaccactctcctccactctctcgagggtatgcccgatctcgagtgggagaagctgctcaagctgcagtgcaaggacggctctttcctcttctccccctcttccactgccttcgccctcatgcagaccaaggacgagaagtgtctccagtacctcaccaacattgtcaccaagttcaacggtggtgtccccaacgtctaccccgttgacctctttgagcacatctgggttgttgaccgactccagcgactcggtatcgcccgatacttcaagtccgagatcaaggactgtgtcgagtacatcaacaagtactggaccaagaacggtatctgctgggcccgaaacacccacgtccaggacattgacgacaccgccatgggcttccgagttctgcgagcccacggctacgatgtcacccccgatgtctttcgacagtttgagaaggacggcaagtttgtctgtttcgccggtcagtccacccaggccgtcaccggtatgttcaacgtctaccgagcttctcagatgctcttccccggtgagcgaatcctcgaggacgccaagaagttctcctacaactacctcaaggagaagcagtccaccaacgagctgctcgacaagtggatcattgccaaggatctgcccggtgaggttggctacgccctcgacatcccctggtacgcctctctgccccgactggagactcgatactacctcgagcagtacggtggtgaggacgatgtctggatcggtaagaccctgtaccgaatgggctacgtttccaacaacacctacctcgagatggccaagctcgactacaacaactacgttgccgtcctccagctcgagtggtacaccatccagcagtggtacgtcgacattggtatcgagaagttcgagtccgacaacatcaagtccgtccttgtctcctactacctcgctgctgcctccatcttcgagcccgagcgatccaaggagcgaattgcctgggccaagaccaccatcctcgtcgacaagatcacctccatcttcgactcctcccagtcctccaaggaagatatcaccgccttcattgacaagttccgaaacaagtcctcctccaagaagcactccatcaacggcgagccctggcacgaggtcatggttgctctcaagaaaactctccacggctttgccctcgacgctctgatgacccactctcaggacatccacccccagctccaccaggcctgggagatgtggctcaccaagctccaggacggtgttgatgtcactgctgagctcatggtccagatgatcaacatgaccgccggccgatgggtttccaaggagctcctcacccacccccagtaccagcgactctccactgtcaccaactctgtctgccacgacatcaccaagctccacaacttcaaggagaactccaccaccgtcgactccaaggtccaggagctggtccagctcgttttctccgacacccccgatgatctcgaccaggacatgaagcagaccttcctgactgtcatgaaaactttctactacaaggcctggtgcgaccccaacaccatcaacgaccacatctccaaggtctttgagattgtgatt

SEQ ID NO: 142 - DNA, 2229 bp, Stevia rebaudiana
atgtgcaaggctgtttccaaggagtactccgatctgctccagaaggacgaggcctctttcaccaagtgggacgacgacaaggtcaaggaccacctcgacaccaacaagaacctctaccccaacgacgagatcaaggagtttgtcgagtccgtcaaggccatgttcggctccatgaacgacggcgagattaatgtctctgcttacgacaccgcctgggttgctctggtccaggatgtcgacggttccggctctcctcagttcccttcctctctcgagtggatcgccaacaaccagctgtccgacggttcttggggtgaccacctgctcttctctgctcacgaccgaatcatcaacaccctggcctgtgtcattgctctgacctcttggaacgtccacccctccaagtgcgagaagggtctgaacttcctccgagagaacatctgcaagctcgaggacgagaacgccgagcacatgcccattggcttcgaggtcaccttcccctctctgattgacattgccaagaagctcaacattgaggtccccgaggacacccccgctctcaaggagatctacgctcgacgagacatcaagctcaccaagatccccatggaggttctccacaaggtccccaccactctcctccactctctcgagggtatgcccgatctcgagtgggagaagctgctcaagctgcagtgcaaggacggctctttcctcttctccccctcttccactgccttcgccctcatgcagaccaaggacgagaagtgtctccagtacctcaccaacattgtcaccaagttcaacggtggtgtccccaacgtctaccccgttgacctctttgagcacatctgggttgttgaccgactccagcgactcggtatcgcccgatacttcaagtccgagatcaaggactgtgtcgagtacatcaacaagtactggaccaagaacggtatctgctgggcccgaaacacccacgtccaggacattgacgacaccgccatgggcttccgagttctgcgagcccacggctacgatgtcacccccgatgtctttcgacagtttgagaaggacggcaagtttgtctgtttcgccggtcagtccacccaggccgtcaccggtatgttcaacgtctaccgagcttctcagatgctcttccccggtgagcgaatcctcgaggacgccaagaagttctcctacaactacctcaaggagaagcagtccaccaacgagctgctcgacaagtggatcattgccaaggatctgcccggtgaggttggctacgccctcgacatcccctggtacgcctctctgccccgactggagactcgatactacctcgagcagtacggtggtgaggacgatgtctggatcggtaagaccctgtaccgaatgggctacgtttccaacaacacctacctcgagatggccaagctcgactacaacaactacgttgccgtcctccagctcgagtggtacaccatccagcagtggtacgtcgacattggtatcgagaagttcgagtccgacaacatcaagtccgtccttgtctcctactacctcgctgctgcctccatcttcgagcccgagcgatccaaggagcgaattgcctgggccaagaccaccatcctcgtcgacaagatcacctccatcttcgactcctcccagtcctccaaggaagatatcaccgccttcattgacaagttccgaaacaagtcctcctccaagaagcactccatcaacggcgagccctggcacgaggtcatggttgctctcaagaaaactctccacggctttgccctcgacgctctgatgacccactctcaggacatccacccccagctccaccaggcctgggagatgtggctcaccaagctccaggacggtgttgatgtcactgctgagctcatggtccagatgatcaacatgaccgccggccgatgggtttccaaggagctcctcacccacccccagtaccagcgactctccactgtcaccaactctgtctgccacgacatcaccaagctccacaacttcaaggagaactccaccaccgtcgactccaaggtccaggagctggtccagctcgttttctccgacacccccgatgatctcgaccaggacatgaagcagaccttcctgactgtcatgaaaactttctactacaaggcctggtgcgaccccaacaccatcaacgaccacatctccaaggtctttgagattgtgatt

SEQ ID NO: 143 - DNA, 2352 bp, Stevia rebaudiana
atgaacctgtctctctgtatcgcctctcctctcctcaccaagtccaaccgacccgctgctctgtctgccatccacaccgcctccacctcccacggcggccagaccaaccccaccaacctcatcattgacaccaccaaggagcgaatccagaagcagttcaagaacgtcgagatctccgtttcctcctacgacaccgcctgggtcgccatggtcccctctcccaactcccccaagtctccctgcttccccgagtgtctcaactggctcatcaacaaccagctcaacgacggctcttggggtctggtcaaccacacccacaaccacaaccaccccctcctcaaggactctctctcttccactctcgcctgcattgttgctctcaagcgatggaacgttggcgaggaccagatcaacaagggtctgtctttcattgagtccaacctcgcctccgccaccgagaagtcccagccctcccccattggctttgatatcatcttccccggtctgctcgagtacgccaagaacctcgatatcaacctgctctccaagcagaccgacttctctctcatgctgcacaagcgagagctcgagcagaagcgatgccactccaacgagatggacggctacctggcctacatttccgagggtctgggtaacctctacgactggaacatggtcaagaagtaccagatgaagaacggttccgttttcaactccccctctgccaccgctgctgccttcatcaaccaccagaaccccggctgtctcaactacctcaactctctgctcgacaagtttggtaacgccgtccccactgtctacccccacgatctcttcatccgactctccatggtcgacaccattgagcgactcggtatttcccaccacttccgagtcgagatcaagaacgttctcgatgagacttaccgatgctgggttgagcgagatgagcagatcttcatggacgttgtcacctgtgctctggccttccgactcctccgaatcaacggttacgaggtttcccccgaccccctcgccgagatcaccaacgagctggctctcaaggacgagtacgccgccctcgagacttaccacgcttctcacattctgtaccaagaggatctgtcctccggcaagcagattctcaagtccgccgacttcctcaaggagatcatctccactgactccaaccgactctccaagctcatccacaaggaagtcgagaacgctctcaagttccccatcaacaccggtctggagcgaatcaacacccgacgaaacatccagctctacaacgtcgacaacacccgaattctcaagaccacctaccactcttccaacatctccaacaccgactacctgcgactcgccgtcgaggacttctacacctgccagtccatctaccgagaggagctcaagggtctggagcgatgggttgtcgagaacaagctcgaccagctcaagtttgcccgacaaaagactgcctactgctacttctccgttgctgccaccctctcttctcccgagctctccgacgcccgaatctcttgggccaagaacggtatcctgaccactgttgtcgacgacttctttgacattggtggcaccattgacgagctgaccaacctcatccagtgcgtcgagaagtggaacgtcgacgttgacaaggactgttgttccgagcacgtccgaatcctcttcctggctctcaaggacgccatctgctggatcggtgacgaggccttcaagtggcaggctcgagatgtcacttcccacgtcatccagacctggctcgagctcatgaactccatgctgcgagaggccatctggacccgagatgcctacgtccccaccctcaacgagtacatggagaacgcctacgtcagctttgctctcggtcccattgtcaagcccgccatctactttgtcggtcccaagctgtccgaggagattgtcgagtcctccgagtaccacaacctcttcaagctcatgtccacccagggccgactcctcaacgatatccactccttcaagcgagagttcaaggaaggtaagctcaacgccgttgctctgcacctgtccaacggtgagtccggcaaggtcgaggaagaggtcgtcgaggagatgatgatgatgatcaagaacaagcgaaaggagctcatgaagctcatcttcgaggagaacggctccattgtcccccgagcctgcaaggacgccttctggaacatgtgccacgtcctcaacttcttctacgccaacgacgacggtttcaccggcaacaccattctcgacaccgtcaaggacatcatctacaaccctctggttctggtcaacgagaacgaggagcagagg

SEQ ID NO: 144 - DNA, 2271 bp, Stevia rebaudiana
atgacctcccacggcggccagaccaaccccaccaacctcatcattgacaccaccaaggagcgaatccagaagcagttcaagaacgtcgagatctccgtttcctcctacgacaccgcctgggtcgccatggtcccctctcccaactcccccaagtctccctgcttccccgagtgtctcaactggctcatcaacaaccagctcaacgacggctcttggggtctggtcaaccacacccacaaccacaaccaccccctcctcaaggactctctctcttccactctcgcctgcattgttgctctcaagcgatggaacgttggcgaggaccagatcaacaagggtctgtctttcattgagtccaacctcgcctccgccaccgagaagtcccagccctcccccattggctttgatatcatcttccccggtctgctcgagtacgccaagaacctcgatatcaacctgctctccaagcagaccgacttctctctcatgctgcacaagcgagagctcgagcagaagcgatgccactccaacgagatggacggctacctggcctacatttccgagggtctgggtaacctctacgactggaacatggtcaagaagtaccagatgaagaacggttccgttttcaactccccctctgccaccgctgctgccttcatcaaccaccagaaccccggctgtctcaactacctcaactctctgctcgacaagtttggtaacgccgtccccactgtctacccccacgatctcttcatccgactctccatggtcgacaccattgagcgactcggtatttcccaccacttccgagtcgagatcaagaacgttctcgatgagacttaccgatgctgggttgagcgagatgagcagatcttcatggacgttgtcacctgtgctctggccttccgactcctccgaatcaacggttacgaggtttcccccgaccccctcgccgagatcaccaacgagctggctctcaaggacgagtacgccgccctcgagacttaccacgcttctcacattctgtaccaagaggatctgtcctccggcaagcagattctcaagtccgccgacttcctcaaggagatcatctccactgactccaaccgactctccaagctcatccacaaggaagtcgagaacgctctcaagttccccatcaacaccggtctggagcgaatcaacacccgacgaaacatccagctctacaacgtcgacaacacccgaattctcaagaccacctaccactcttccaacatctccaacaccgactacctgcgactcgccgtcgaggacttctacacctgccagtccatctaccgagaggagctcaagggtctggagcgatgggttgtcgagaacaagctcgaccagctcaagtttgcccgacaaaagactgcctactgctacttctccgttgctgccaccctctcttctcccgagctctccgacgcccgaatctcttgggccaagaacggtatcctgaccactgttgtcgacgacttctttgacattggtggcaccattgacgagctgaccaacctcatccagtgcgtcgagaagtggaacgtcgacgttgacaaggactgttgttccgagcacgtccgaatcctcttcctggctctcaaggacgccatctgctggatcggtgacgaggccttcaagtggcaggctcgagatgtcacttcccacgtcatccagacctggctcgagctcatgaactccatgctgcgagaggccatctggacccgagatgcctacgtccccaccctcaacgagtacatggagaacgcctacgtcagctttgctctcggtcccattgtcaagcccgccatctactttgtcggtcccaagctgtccgaggagattgtcgagtcctccgagtaccacaacctcttcaagctcatgtccacccagggccgactcctcaacgatatccactccttcaagcgagagttcaaggaaggtaagctcaacgccgttgctctgcacctgtccaacggtgagtccggcaaggtcgaggaagaggtcgtcgaggagatgatgatgatgatcaagaacaagcgaaaggagctcatgaagctcatcttcgaggagaacggctccattgtcccccgagcctgcaaggacgccttctggaacatgtgccacgtcctcaacttcttctacgccaacgacgacggtttcaccggcaacaccattctcgacaccgtcaaggacatcatctacaaccctctggttctggtcaacgagaacgaggagcagagg

SEQ ID NO: 145 - DNA, 1539 bp, Stevia rebaudiana
atggacgccgtcactggtctgctcaccgtccccgccactgccatcaccatcggtggtactgccgttgctctggccgttgctctcatcttctggtacctcaagtcctacacctctgcccgacgatcccagtccaaccacctcccccgagtccccgaggtccccggtgtccccctgctcggtaacctgctccagctcaaggagaagaagccctacatgaccttcacccgatgggctgccacctacggccccatctactccatcaagactggtgccacctccatggttgttgtctcttccaacgagattgctaaagaggctctcgtcacccgattccagtccatctccacccgaaacctctccaaggctctcaaggttctgaccgccgacaagaccatggttgccatgtccgactacgacgactaccacaagaccgtcaagcgacacattctcaccgccgttctcggccccaacgcccagaagaagcaccgaatccaccgagacatcatgatggacaacatctccacccagctccacgagtttgtcaagaacaaccccgagcaggaagaggttgatctccgaaagatcttccagtccgagctcttcggtctggccatgcgacaggctctgggcaaggatgtcgagtctctctacgtcgaggatctcaagatcaccatgaaccgagatgagatcttccaggttctggttgtcgaccccatgatgggtgccattgatgtcgactggcgagacttcttcccctacctcaagtgggtccccaacaagaagtttgagaacaccatccagcagatgtacatccgacgagaggctgtcatgaagtctctcatcaaggagaacaagaagcgaattgcctccggtgagaagctcaactcctacattgactacctgctctccgaggcccagaccctcaccgaccagcagctgctcatgtctctgtgggagcccatcattgagtcctccgacaccaccatggtcaccaccgagtgggccatgtacgagctcgccaagaaccccaagctccaggaccgactctaccgagacatcaagtctgtctgtggctccgagaagatcaccgaggagcacctgtcccagctcccctacatcactgccatcttccacgagactctccgacgacactctcccgtccccatcatccctctccgacacgtccacgaggacaccgttctgggtggctaccacgtccccgccggtaccgagctcgctgtcaacatctacggctgcaacatggacaagaacgtctgggagaaccccgaggagtggaaccccgagcgattcatgaaggagaacgagactattgacttccagaaaaccatggcctttggtggtggcaagcgagtctgcgccggctctctccaggctctgctgaccgcctccattggtattggccgaatggtccaggagttcgagtggaagctcaaggacatgacccaggaagaggtcaacaccattggcctcaccacccagatgctccgacctctccgagccatcatcaagccccgaata

SEQ ID NO: 146 - DNA, 1566 bp, Stevia rebaudiana
atgggtctgttccccctcgaggactcctacgctctggtctttgagggcctcgccatcaccctcgccctctactacctgctctccttcatctacaagacctccaagaaaacctgcactcctcccaaggcctccggtgagcaccccatcaccggccacctcaacctgctctccggctcttccggcctcccccacctcgccctcgcctctctggctgaccgatgtggtcccatcttcaccatccgactcggtatccgacgagtcctcgttgtctccaactgggagattgccaaggagatcttcaccacccacgatctcattgtctccaaccgacccaagtacctggctgccaagattctcggtttcaactacgtttccttctcctttgccccctacggcccctactgggtcggtatccgaaagatcattgccaccaagctcatgtcctcttctcgactccagaagctccagttcgtccgagtctttgagctcgagaactccatgaagtccatccgagagtcttggaaggagaagaaggacgaggaaggcaaggttctggtcgagatgaagaagtggttctgggagctcaacatgaacattgttctgcgaactgttgctggtaagcagtacaccggtaccgtcgacgacgccgatgccaagcgaatctccgagctcttccgagagtggttccactacaccggccgatttgttgtcggtgacgccttccccttcctcggctggctcgatctcggtggctacaagaaaaccatggagctcgtcgcctcccgactcgactccatggtcagcaagtggctcgacgagcaccgaaagaagcaggccaacgacgacaagaaagaggacatggacttcatggacatcatgatctccatgaccgaggccaactctcccctcgagggttacggtaccgacaccatcatcaagaccacctgcatgaccctcattgtctccggtgtcgacaccacctccattgtcctgacctgggctctgtctctgctgctcaacaaccgagacactctcaagaaggcccaggaagagctcgacatgtgtgtcggcaagggccgacaggtcaacgagtccgatctggtcaacctcatctacctcgaggctgttctcaaggaagctctgcgactctaccccgctgccttcctcggtggtccccgagccttcctcgaggactgcactgttgccggctaccgaatccccaagggtacctgtctgctcatcaacatgtggaagctccaccgagatcccaacatctggtccgacccctgcgagttcaagcccgagcgattcctgacccccaaccagaaggacgttgatgtcattggtatggacttcgagctcatccccttcggtgccggccgacgatactgccccggtacccgactcgccctccagatgctgcacattgttctcgccactctgctccagaactttgagatgtccacccccaacgacgcccccgtcgacatgactgcttccgtcggtatgaccaacgccaaggcttctcctctcgaggtcctcctgtctccccgagtcaagtggtca

SEQ ID NO: 147 - DNA, 1443 bp, Stevia rebaudiana
atggacgccatggccaccaccgagaagaagccccacgtcatcttcatccccttccccgcccagtcccacatcaaggccatgctcaagctcgcccagctcctccaccacaagggcctccagatcacctttgtcaacaccgacttcatccacaaccagttcctcgagtcctccggcccccactgtctggacggtgctcccggtttccgatttgagactatccccgatggtgtctcccactcccccgaggcctccatccccatccgagagtctctgctccgatccattgagactaacttcctcgaccgattcattgatctcgtcaccaagctccccgatcctcccacctgtatcatctccgacggtttcctgtccgttttcaccattgatgctgccaagaagctcggtatccccgtcatgatgtactggactctggctgcctgtggtttcatgggtttctaccacatccactctctgatcgagaagggctttgctcctctcaaggacgcctcctacctcaccaacggttacctcgacaccgtcattgactgggtccccggtatggagggtatccgactcaaggacttccccctcgactggtccaccgacctcaacgacaaggttctcatgttcaccaccgaggctccccagcgatcccacaaggtttcccaccacatcttccacaccttcgacgagctcgagccctccatcatcaagactctgtctctgcgatacaaccacatctacaccattggccccctccagctcctcctcgaccagatccccgaggagaagaagcagaccggtatcacctctctgcacggctactctctcgtcaaggaagagcccgagtgcttccagtggctccagtccaaggagcccaactccgttgtctacgtcaactttggctccaccaccgtcatgtctctcgaggacatgaccgagtttggctggggtctggccaactccaaccactacttcctgtggatcatccgatccaacctcgtcattggcgagaacgccgttctgcctcccgagctcgaggagcacatcaagaagcgaggcttcattgcctcttggtgctcccaggagaaggttctcaagcacccctccgtcggtggtttcctgacccactgcggctggggctccaccattgagtctctgtccgctggtgtccccatgatctgctggccctactcctgggaccagctcaccaactgccgatacatctgcaaggagtgggaggttggtctggagatgggtaccaaggtcaagcgagatgaggtcaagcgactcgtccaggagctcatgggcgagggtggtcacaagatgcgaaacaaggccaaggactggaaggagaaggcccgaattgccattgcccccaacggctcttcttctctcaacattgacaagatggtcaaggagatcactgttctcgctcgaaac

SEQ ID NO: 148 - DNA, 1380 bp, Stevia rebaudiana
atggccgagcagcagaagatcaagaagtctccccacgttctgctcatccccttccctctgcagggccacatcaaccccttcatccagttcggcaagcgactcatctccaagggtgtcaagaccactctggtcaccaccatccacaccctcaactccactctcaaccactccaacaccaccaccacctccatcgagatccaggccatctccgacggctgtgacgagggtggtttcatgtctgctggtgagtcttacctcgagactttcaagcaggtcggttccaagtctctggctgacctcatcaagaagctccagtccgagggtaccaccattgacgccatcatctacgactccatgaccgagtgggttctcgatgtcgccatcgagtttggtattgacggtggctccttcttcacccaggcctgtgtcgtcaactctctctactaccacgtccacaagggtctgatctctctgcccctcggcgagactgtctccgtccccggtttccccgttctgcagcgatgggagactcctctcattctccagaaccacgagcagatccagtccccctggtcccagatgctcttcggccagttcgccaacattgaccaggcccgatgggttttcaccaactccttctacaagctcgaggaagaggtcattgagtggacccgaaagatctggaacctcaaggtcattggccccaccctcccctccatgtacctcgacaagcgactcgatgacgacaaggacaacggtttcaacctctacaaggccaaccaccacgagtgcatgaactggctcgacgacaagcccaaggagtccgttgtctacgttgcctttggctctctggtcaagcacggccccgagcaggttgaggagatcacccgagctctgattgactccgatgtcaacttcctgtgggtcatcaagcacaaggaagagggtaagctccccgagaacctgtccgaggtcatcaagaccggcaagggcctcattgttgcctggtgcaagcagctcgacgttctcgcccacgagtccgtcggctgctttgtcacccactgcggtttcaactccaccctcgaggctatctctctcggtgtccccgttgttgccatgccccagttctccgaccagaccaccaacgccaagctcctcgatgagattctcggtgtcggtgtccgagtcaaggctgacgagaacggtattgtccgacgaggtaacctggcttcttgtatcaagatgatcatggaggaagagcgaggtgtcatcatccgaaagaacgccgtcaagtggaaggatctggccaaggttgctgtccacgagggtggctcttccgacaacgacattgtcgagtttgtctccgagctcatcaaggcc

SEQ ID NO: 149 - DNA, 1374 bp, Stevia rebaudiana
atggagaacaagaccgagactaccgtccgacgacgacgacgaatcattctcttccccgtccccttccagggccacatcaaccccattctgcagctcgccaacgttctgtactccaagggcttctccatcaccatcttccacaccaacttcaacaagcccaagacctccaactacccccacttcactttccgattcatcctcgacaacgacccccaggacgagcgaatctccaacctgcccacccacggtcctctggctggtatgcgaatccccatcatcaacgagcacggtgctgacgagctccgacgagagctcgagctgctcatgctcgcctccgaagaggacgaggaagtctcctgtctgatcaccgatgctctgtggtactttgcccagtccgtcgccgactctctcaacctgcgacgactcgttctcatgacctcctctctgttcaacttccacgcccacgtttctctgccccagtttgacgagctcggttacctcgaccccgatgacaagacccgactcgaggagcaggcttccggtttccccatgctcaaggtcaaggacatcaagtccgcctactccaactggcagattctcaaggagattctcggcaagatgatcaagcagaccaaggcctcctccggtgtcatctggaactccttcaaggagctcgaggagtccgagctcgagactgtcatccgagagatccccgctccctctttcctcatccccctgcccaagcacctcaccgcttcctcctcttctctgctcgaccacgaccgaaccgtctttcagtggctcgaccagcagcccccttcctccgtcctctacgtttccttcggctccacctccgaggtcgacgagaaggacttcctcgagattgctcgaggcctcgttgactccaagcagtccttcctgtgggttgtccgacccggctttgtcaagggctccacctgggttgagcccctgcccgatggtttcctcggtgagcgaggccgaattgtcaagtgggtcccccagcaggaagttctggcccacggtgccattggtgccttctggacccactccggctggaactccactctcgagtccgtctgcgagggtgtccccatgatcttctccgactttggcctcgaccagcccctcaacgcccgatacatgtccgatgttctcaaggtcggtgtctacctcgagaacggctgggagcgaggtgagattgccaacgccatccgacgagtcatggtcgacgaggaaggtgagtacatccgacagaacgcccgagtcctcaagcagaaggccgatgtctctctcatgaagggtggttcttcttacgagtctctcgagtctctcgtttcctacatctcttctttg

SEQ ID NO: 150 - DNA, 2130 bp, Stevia rebaudiana
atgcagtccgactccgtcaaggtcagccccttcgatcttgtctccgccgccatgaacggcaaggccatggagaagctcaacgcctccgagtccgaggaccccaccaccctccccgctctcaagatgctcgtcgagaaccgagagctcctcaccctcttcaccacctccttcgccgttctcattggctgtctggtctttctcatgtggcgacgatcttcctccaagaagctcgtccaggaccccgtcccccaggtcattgttgtcaagaagaaggagaaggagtccgaggtcgacgacggcaagaagaaggtttccatcttctacggtactcagaccggtactgccgagggtttcgccaaggctctcgtcgaggaagccaaggtccgatacgaaaagacctccttcaaggtcatcgatctcgatgactacgctgctgacgacgacgagtacgaggagaagctcaagaaggagtctctcgccttcttcttcctggccacctacggtgacggtgagcccactgacaacgccgccaacttctacaagtggttcaccgagggtgacgacaagggcgagtggctcaagaagctccagtacggtgtctttggcctcggtaaccgacagtacgagcacttcaacaagattgccattgttgtcgacgacaagctgaccgagatgggcgccaagcgactcgttcccgtcggcctcggtgatgatgaccagtgtatcgaggacgacttcaccgcctggaaggagctcgtctggcccgagctcgaccagctgctgcgagatgaggacgacacttccgtcaccactccctacaccgctgctgttctcgagtaccgagttgtctaccacgacaagcccgctgactcctacgccgaggaccagacccacaccaacggccacgttgtccacgacgcccagcacccctctcgatccaacgttgccttcaagaaggagctccacacctcccagtccgaccgatcttgcacccacctcgagtttgacatctcccacactggtctgtcttacgaaaccggcgaccacgtcggtgtctactccgagaacctctccgaggttgtcgacgaggctctcaagctgctcggtctgtctcccgacacctacttctccgtccacgccgataaagaggacggcacccccatcggtggtgcttctctgcctcctccctttcccccttgcactctgcgagatgctctgacccgatacgccgacgttctctcttctcccaagaaggttgctctgctggccctcgccgcccacgcctccgacccctccgaggccgaccgactcaagttcctcgcctctcccgctggtaaggacgagtacgcccagtggatcgtcgccaaccagcgatctctgctcgaggtcatgcagtccttcccctctgccaagccccctctgggtgttttcttcgccgccgttgctccccgactccagccccgatactactccatctcttcttctcccaagatgtcccccaaccgaatccacgtcacctgtgctctggtctacgaaaccacccccgccggccgaatccaccgaggcctctgttccacctggatgaagaacgccgtccccctgaccgagtcccccgactgctcccaggcttccatcttcgtccgaacctccaacttccgactccccgttgaccccaaggtccccgtcatcatgatcggtcccggtaccggtctggcccccttccgaggcttcctgcaggagcgactcgctctcaaggagtccggcaccgagctcggttcctccatcttcttctttggctgccgaaaccgaaaggtcgacttcatctacgaggacgagctcaacaactttgtcgagactggtgctctctccgagctcattgttgccttctcccgagagggtaccgccaaggagtacgtccagcacaagatgtcccagaaggcctccgacatctggaagctcctctccgagggtgcctacctctacgtctgcggtgacgccaagggtatggccaaggatgtccaccgaaccctgcacaccattgtccaggagcagggctctctcgactcttccaaggccgagctctacgtcaagaacctccagatgtccggccgatacctccgagatgtgtgg

SEQ ID NO: 151 - DNA, 2397 bp, Lactuca sativa
atgaaaaccatgatctcttctcccatccccgctttccacccccgattctctcctgctgctggctctcgacgactctcccccatcctcccctcttccggctccgtcgttctgaccggctccaagacccagtgcaaggctgtctccaagtcccccacccaggagtacttcgacgttctgcagaagaacggtctgcccttcatcaactggcagaacgacgttgtcgaggacgagctcgacaaggagaagaagattctctaccccaacgacgagatcaagggctttgtcgagcgaatcaaggtcatgctcggctccatggacgagggtgagatcactgtctccgcctacgacaccgcctgggttgctctcgtccaggacattgacggcaacggtcgacccgagttcccctcctctctcgagtggatcgtcaagaaccagctgtccgacggctcttggggtgaccacctcatcttctccgcccacgaccgaatcatcaacaccctcgcctgtgtcattgctctgacctcttggaacgtccaccccggcaagtgccagaagggtctgaagttcctcaacgacaacatctccaagctcgaagaggagaaccccgagcacatgcccattggtttcgaggttgccttcccctctctcattgacattgcccgaaagctcgatatccaggtccccgaggactcccctgctctcaaggagatctacgcccgacgaaacctcaagctcaccaagatccccaagtctctcatgcacaaggtccccaccactctgctgcactctctcgagggtatgcccgatctcgagtgggagaagctgctcaagctccagtgcaaggacggttccttcctcttctccccctcctccaccgccttcgccctcatgcagaccaaggaccagaagtgtctgcagtacctcaccgacgccgtcaccaagttcaacggtggtgtccccaacgtctaccccgtcgacctctttgagcacatctgggttgtcgaccgactgcagcgactcggtatctctcgatactttgactccgagatcaaggactgtgtcgactacatctaccgatactggaccaaggacggtatctgctgggccaagaactccaacgtccaggacattgacgacaccgccatgggcttccgagttctgcgaatgcacggctacaaggtcaccactgacgttttccgacagttcgagaaggacggcaagttcgtctgtttccccggccagaccacccaggccgtcaccggtatgttcaacctcttccgagcttcccaggttctcttccccgacgagaagattctcgaggacgccaagaagttctcctacaactacctcaaggagaagcagtccaccaacgagctcctcgacaagtggatcattgccaaggatctgcccggtgaggtcgagtacgccctcgatgtcccctggtacgcctctctgcctcgactcgagactcgattctacctcgagcagtacggtggcgaggacgatgtctggatcggtaagactctctaccgaatgggtaacgtttccaacaacacctacctcgagatggccaagctcgactacaacaactgtctggccatccaccacctcgagtggaacaccatgcagcagtggtacgtcgactttggtatggagcgattcggtacctccgatatcacctctctgcttgtctcttactacctcgccgctgcctccgtctttgagcccgagcgatccaaggagcgaattgcctgggccaagaccaccactctggtcgacaccatctcctccttcttccactctctcaagatctccaacgagcaccgacgagagtttgtcgaggagttccgaaacatctccaactccatccaccacgccaagtacggcaagccctggcacggtctgatggttgctctcaagggtactctgcacgagattgctctcgatgttctcatgacccaccgacgagacatccacccccagctccaccacgcctgggagatgtggctcatgcgatggcagcagggtgttgacgccaccgagggccaggctgagctcattgtccagaccatcaacatgaccgccggtcgatgggtttccaacgagctgctcgcccacccccagtaccgactcctctcctccgtcatcaacaacatctgccacgagatctaccacaaccgaacctgcatggaggtcaactccaccaccatctccacctccattgactccaagatgcaggagctcgtccagctggttctctccgactctctcgatgatctcgaccaggatctcaagcagaccttcctgaccgttgccaagaccttctactacaaggcctactgcgaccccgagactatcaacgtccacatctccaaggtcatgtttgagactattatt

SEQ ID NO: 152 - DNA, 2271 bp, Lactuca sativa
atgtgcaaggctgtctccaagtcccccacccaggagtacttcgacgttctgcagaagaacggtctgcccttcatcaactggcagaacgacgttgtcgaggacgagctcgacaaggagaagaagattctctaccccaacgacgagatcaagggctttgtcgagcgaatcaaggtcatgctcggctccatggacgagggtgagatcactgtctccgcctacgacaccgcctgggttgctctcgtccaggacattgacggcaacggtcgacccgagttcccctcctctctcgagtggatcgtcaagaaccagctgtccgacggctcttggggtgaccacctcatcttctccgcccacgaccgaatcatcaacaccctcgcctgtgtcattgctctgacctcttggaacgtccaccccggcaagtgccagaagggtctgaagttcctcaacgacaacatctccaagctcgaagaggagaaccccgagcacatgcccattggtttcgaggttgccttcccctctctcattgacattgcccgaaagctcgatatccaggtccccgaggactcccctgctctcaaggagatctacgcccgacgaaacctcaagctcaccaagatccccaagtctctcatgcacaaggtccccaccactctgctgcactctctcgagggtatgcccgatctcgagtgggagaagctgctcaagctccagtgcaaggacggttccttcctcttctccccctcctccaccgccttcgccctcatgcagaccaaggaccagaagtgtctgcagtacctcaccgacgccgtcaccaagttcaacggtggtgtccccaacgtctaccccgtcgacctctttgagcacatctgggttgtcgaccgactgcagcgactcggtatctctcgatactttgactccgagatcaaggactgtgtcgactacatctaccgatactggaccaaggacggtatctgctgggccaagaactccaacgtccaggacattgacgacaccgccatgggcttccgagttctgcgaatgcacggctacaaggtcaccactgacgttttccgacagttcgagaaggacggcaagttcgtctgtttccccggccagaccacccaggccgtcaccggtatgttcaacctcttccgagcttcccaggttctcttccccgacgagaagattctcgaggacgccaagaagttctcctacaactacctcaaggagaagcagtccaccaacgagctcctcgacaagtggatcattgccaaggatctgcccggtgaggtcgagtacgccctcgatgtcccctggtacgcctctctgcctcgactcgagactcgattctacctcgagcagtacggtggcgaggacgatgtctggatcggtaagactctctaccgaatgggtaacgtttccaacaacacctacctcgagatggccaagctcgactacaacaactgtctggccatccaccacctcgagtggaacaccatgcagcagtggtacgtcgactttggtatggagcgattcggtacctccgatatcacctctctgcttgtctcttactacctcgccgctgcctccgtctttgagcccgagcgatccaaggagcgaattgcctgggccaagaccaccactctggtcgacaccatctcctccttcttccactctctcaagatctccaacgagcaccgacgagagtttgtcgaggagttccgaaacatctccaactccatccaccacgccaagtacggcaagccctggcacggtctgatggttgctctcaagggtactctgcacgagattgctctcgatgttctcatgacccaccgacgagacatccacccccagctccaccacgcctgggagatgtggctcatgcgatggcagcagggtgttgacgccaccgagggccaggctgagctcattgtccagaccatcaacatgaccgccggtcgatgggtttccaacgagctgctcgcccacccccagtaccgactcctctcctccgtcatcaacaacatctgccacgagatctaccacaaccgaacctgcatggaggtcaactccaccaccatctccacctccattgactccaagatgcaggagctcgtccagctggttctctccgactctctcgatgatctcgaccaggatctcaagcagaccttcctgaccgttgccaagaccttctactacaaggcctactgcgaccccgagactatcaacgtccacatctccaaggtcatgtttgagactattatt

SEQ ID NO: 153 - DNA, 2283 bp, Picea glauca
atgaagatgtccaagtccgtcgaggtccagcactgcgccgtccagttcctgtcctccaccaccgaccagattgagatccgagagcgaaacctccagatctccaccgaggccatgaagatgaagtcttggatcgagactgtcaagtacattctgcagtccatggaggacggtgagatcaccatctctgcttacgacactgcctggatcgccctcgtccccgctctcaacggctcttccgagccccagttcccctcttctctgcagtggctcatcaacaaccagctccaggacggctcttggggtgaccccctcatgttcctcatccgagatcgaatcatcaacaccctcgcctgtgtccttgctctcaagacctggaacatccactctctcggtgtcaacaagggtctgtccttcctccagacctacatccccaagatgaacgacgagcacgacgcccacacccccgttggctttgagattgtctttcctgctctcatggaggacgccaagatcatggagctcgatctgccctacgacgccgagttcctccagaagatctacgacgagcgagatctcaagatgaagcgaatccccatgaaggttctgcacgagttcccctccactctgctccactctctcgagggcctccgagacaaggtcaactgggaggagctcctcaagctccagtccaagaacggttccttcctcttctcccccgcctccaccgcctgtgctctggcccagacctccgacaccaactgtctgcgatacctcaacgagatcaccaagaagtacgacggtggtgctcccaacgtctaccccgttgacctctttgagcgactctggaccgtcgaccgaattgagcgactcggtattgcccgatactttgagtccgagatcaccgactctctcgagtacgtctaccgatactggaccaaccagggtattggctgggcccgagactcccccgtcaaggacgttgacgacacctccatggccttccgactgctgcgatcccacggcttcgatgtcactgccgaggccttcaaccacttcaagcaggacgaccagttcttctgcttctttggccagaccaagcagaccgtcaccggtatgtacaacctctaccgagcctcccagttctccttccccggtgagtccatcctcgaggaagctcgagtctttaccaagaacttcctcgaggagaagcgagctgagaagcagctgcgagacaagtggatcattgccaagggcctcaaggaagaggtcgagtacgctctcaagttcccctggtacgcctctcagcctcgaattgacacccgaatgtacatcaaccagtaccgagttgatgatgtctggatcggtaaggctctctaccgaatgcccattgtcaacaacaagacctacattgagctcgccaaggctgacttcaacatctgccagtccatccaccgaaccgagctccacggtatcatccgatggtaccgagagtccggtctggacgagctcggtctgcgacaggaccagattgtcaagtcttacttcctcgccgccattgccatctacgagcccgacatggcctccgcccgactcgcctgggccaagtctgctgttctcatggctgccatccgaatcttcttctccggtgagaactgctttgcccaccaccgacgacagttcctcgacgccttcacccgatgggacggccgagccatgcgagactcccccaactccgccaagcgactcttctcttgtctcttccgaatggtcaacctcttctccgtcgacggtgttgttgcccagggccgagacatctccggtgatctgcgacaccgatgggagcactggctcgcctccgaggccgaggatctgaccgacgcccaggaccacgagaagctcggtaccgaggctgagattgttgttctgaccgctgctttcctcggccgagagactatctcccccgatctcatctcccaccccgacttctcctccatcatgaaggtcaccaacaccgtctgctctctgctgcgacgaattgccacctacaaggaagagggctgcgactccccctccggtactgaagaggacgaccgactcaagcgacgagctgaagagggtatgggccaccttgtccgagccgtctaccgacaccagtactcccccgtcccctctggtgtcaagcgactctgtctggttgtcggcaagtctttctactacgccgcccactgcaacaacgaggaagtcggcaaccacgttgagactgttctcttccagcccgtgtat

SEQ ID NO: 154 - DNA, 1548 bp, Bradyrhizobium japonicum
atgaacgccctctccgagcacattctgtccgagctccgacgactcctctccgagatgtccgacggtggttccgtcggcccctccgtctacgacaccgcccaggctctgcgattccacggtaacgtcaccggccgacaggacgcctacgcctggctcattgcccagcagcaggctgacggtggctggggttccgccgacttccctctcttccgacacgcccccacctgggctgctctgctcgctctgcagcgagccgaccccctccccggtgctgccgacgccgtccagaccgccacccgattcctccagcgacagcccgacccctacgcccacgccgtccccgaggacgcccccattggtgccgagctcatcctcccccagttctgcggtgaggctgcttctctgctcggtggtgttgccttcccccgacaccccgctctgctccccctccgacaggcctgtctggtcaagctcggtgccgtcgccatgctcccctccggccaccctctgctccactcttgggaggcctggggtacttctcccaccactgcctgccccgacgacgacggctccatcggtatctctcccgctgccaccgccgcctggcgagcccaggctgtcacccgaggctccactccccaggtcggccgagccgatgcctacctccagatggcctctcgagccacccgatccggtatcgagggtgttttccccaacgtctggcccatcaacgtctttgagccctgctggtccctctacaccctccacctcgccggcctcttcgcccaccccgctctcgccgaggctgtccgagtcatcgtcgcccagctcgacgcccgactcggtgtccacggtcttggccccgctctgcactttgctgccgacgccgacgacaccgccgttgctctctgtgttctgcacctcgccggccgagatcccgccgtcgatgctctgcgacactttgagattggtgagctcttcgtcaccttccccggtgagcgaaacgcctccgtttccaccaacatccacgccctccacgccctccgactcctcggcaagcccgctgccggtgcctccgcctacgtcgaggccaaccgaaacccccacggtctgtgggacaacgagaagtggcacgtcagctggctctaccccaccgcccacgccgttgctgctctcgcccagggcaagccccagtggcgagatgagcgagctctggctgctctgctccaggcccagcgagatgacggtggctggggtgctggccgaggctccaccttcgaggagactgcctacgccctcttcgccctccacgtcatggacggctctgaagaggccaccggccgacgacgaatcgcccaggttgttgcccgagctctcgagtggatgctcgcccgacacgccgcccacggtctgccccagacccctctgtggatcggtaaggagctctactgccccacccgagttgtccgagttgccgagctcgccggtctgtggctcgctctgcgatggggccgacgagtcctcgccgagggtgccggtgctgcccca

SEQ ID NO: 155 - DNA, 2364 bp, Lactuca sativa
atgaacattgcccagatcacctcttctgccatgctcgtcccctcttcccacattccccaccgatcttgggtcgtcaactgctgcatggtccagtacaacccctccggtctgcgaaccgcttcttcccaggctggccaggtcaaccccactgtcatgaccctcgatgtcaccaaggagcgaatccgaaagctcttcaacaacgttgaggtttccgtttcctcttacgacaccgcctgggttgccatggtcccctctcccaactcccccaagtctccttgtttccccgactgtctcaactggctcctcgacaaccagctcgacgacggctcttggggtctgctcccccaccagtctcctctgatcaaggacaccctctcttccactctggcctgtgtccttgctctcaagcgatggaacgtcggtaaggaccagatcaacaagggtctgcactacattgagtccaactttgcctccgtcaccgacaagaaccaggcttctccctttggcttcgacatcatcttccccggtatgctcgagtacgccaaggacctcgatatcaagctgcccctcaaccagacccacctgtccgtcatgctccacgagcgagagctcgagctccgacgatgccactccaacggccgagaggcctacctcgcctacatctccgagggtcttggtaacctcaacgactggaacatggtcatgaagtaccagatgaagaacggctctctgttcaactccccctctgccaccgcctccgttctcatccaccaccagaacgccggctgtctgcactacctgacctctctgctcgacaagtttggtaacgctgtccccaccgtctaccccattgatctgtacgtccgactctccatggtcgacaccctcgagcgactcggtatcaagcgacacttcatggtcgagatccagaacgttctcgacgagacttaccgatgctgggtccagggtgatgtccagatcttcatggacgttgtcacctgtgctctggccttccgagttctgcgatccaacggttacgaggtttcttccgaccctctggccaagatcaccaaggaaggtgactacatgaactcccccgagaagcccttcaaggacgtctacacctctctcgaggtctacaaggcctcccagatcatctaccaagaggagctcgccttccgagagcagaacctgacctcctacctgccctcttccaacaagctctccaactacattctcaaagaggtcgacgacgctctcaagttccccttcaacggctctctcgagcgaatgtccacccgacgaaacattgagcactacaacctcaaccacacccgaattctcaagaccacctactcctcttccaacatctccaacaaggactacctcaagctcgccgtccaggacttcaacgagtgccagtccatctactgtgaggagctcaaggacctcgagcgatgggttgtcgagaaccgactcgacaagctcaagtttgcccgacaaaagactgcttactgctacttctccgctgcctctttcctctcctcccccgatctgtccgacgcccgaatctcttgggccaagtcctccattctgaccaccgtcattgacgacttcttcgatgtcggtggctccatggacgagctcgtcaactttgtccacatcattgagaagtggaacgtcaacgtcgagaacgactgctgctccgaagaggtcggtgttctcttcctggctctcaaggacgccgtctgctggatcggtgacaaggccttcaagatccaggagcgaaacatcacctcccacgtcattgagatctggctcgatctcgtcaagtccatgctgcgagaggccatctgggccaaggacggctccatccccaccatcaacgagtacatggagaacggctacgtttcctttgctctcggtcccattgttctgcccactctctacttcctcggtgtcaagctgtccgaggaagttgtccagtcctccgagtaccacaagctctacgaggtcatgtccacccagggccgactcatgaacgacatccactccttcaagcgagagaagaaggctggtaagctcaacgccgtcgccctctacatgtccgacggcaagtccggctccgtcgaagaggaagttgtcgaggagatgaagatcctcaccaagtcccagcgaaaggagatgatgaagctcgttctcgagactaagggctccgtcgtcccccgagtctgcaaggatgttttctggaacatgtgcaacgttctcaacctcttctacgccaccgacgacggtttcactggtaacgccattctcgatgttgtcaaggagatcatctacgagcccgtttcccacgagctcatc

SEQ ID NO: 156 - DNA, 2250 bp, Lactuca sativa
atggcttcttcccaggctggccaggtcaaccccactgtcatgaccctcgatgtcaccaaggagcgaatccgaaagctcttcaacaacgttgaggtttccgtttcctcttacgacaccgcctgggttgccatggtcccctctcccaactcccccaagtctccttgtttccccgactgtctcaactggctcctcgacaaccagctcgacgacggctcttggggtctgctcccccaccagtctcctctgatcaaggacaccctctcttccactctggcctgtgtccttgctctcaagcgatggaacgtcggtaaggaccagatcaacaagggtctgcactacattgagtccaactttgcctccgtcaccgacaagaaccaggcttctccctttggcttcgacatcatcttccccggtatgctcgagtacgccaaggacctcgatatcaagctgcccctcaaccagacccacctgtccgtcatgctccacgagcgagagctcgagctccgacgatgccactccaacggccgagaggcctacctcgcctacatctccgagggtcttggtaacctcaacgactggaacatggtcatgaagtaccagatgaagaacggctctctgttcaactccccctctgccaccgcctccgttctcatccaccaccagaacgccggctgtctgcactacctgacctctctgctcgacaagtttggtaacgctgtccccaccgtctaccccattgatctgtacgtccgactctccatggtcgacaccctcgagcgactcggtatcaagcgacacttcatggtcgagatccagaacgttctcgacgagacttaccgatgctgggtccagggtgatgtccagatcttcatggacgttgtcacctgtgctctggccttccgagttctgcgatccaacggttacgaggtttcttccgaccctctggccaagatcaccaaggaaggtgactacatgaactcccccgagaagcccttcaaggacgtctacacctctctcgaggtctacaaggcctcccagatcatctaccaagaggagctcgccttccgagagcagaacctgacctcctacctgccctcttccaacaagctctccaactacattctcaaagaggtcgacgacgctctcaagttccccttcaacggctctctcgagcgaatgtccacccgacgaaacattgagcactacaacctcaaccacacccgaattctcaagaccacctactcctcttccaacatctccaacaaggactacctcaagctcgccgtccaggacttcaacgagtgccagtccatctactgtgaggagctcaaggacctcgagcgatgggttgtcgagaaccgactcgacaagctcaagtttgcccgacaaaagactgcttactgctacttctccgctgcctctttcctctcctcccccgatctgtccgacgcccgaatctcttgggccaagtcctccattctgaccaccgtcattgacgacttcttcgatgtcggtggctccatggacgagctcgtcaactttgtccacatcattgagaagtggaacgtcaacgtcgagaacgactgctgctccgaagaggtcggtgttctcttcctggctctcaaggacgccgtctgctggatcggtgacaaggccttcaagatccaggagcgaaacatcacctcccacgtcattgagatctggctcgatctcgtcaagtccatgctgcgagaggccatctgggccaaggacggctccatccccaccatcaacgagtacatggagaacggctacgtttcctttgctctcggtcccattgttctgcccactctctacttcctcggtgtcaagctgtccgaggaagttgtccagtcctccgagtaccacaagctctacgaggtcatgtccacccagggccgactcatgaacgacatccactccttcaagcgagagaagaaggctggtaagctcaacgccgtcgccctctacatgtccgacggcaagtccggctccgtcgaagaggaagttgtcgaggagatgaagatcctcaccaagtcccagcgaaaggagatgatgaagctcgttctcgagactaagggctccgtcgtcccccgagtctgcaaggatgttttctggaacatgtgcaacgttctcaacctcttctacgccaccgacgacggtttcactggtaacgccattctcgatgttgtcaaggagatcatctacgagcccgtttcccacgagctcatc

SEQ ID NO: 157 - DNA, 2271 bp, Picea glauca
atgaagcgagagcagtacaccatcctcaacgagaaggagtccatggccgaggagctcatcctccgaatcaagcgaatgttctccgagattgagaacacccagacctccgcctccgcctacgacaccgcctgggttgccatggtcccctctctcgactcctcccagcagccccagttcccccagtgcctctcttggatcatcgacaaccagctcctcgacggctcttggggtatcccctacctcatcatcaaggaccgactctgccacaccctcgcctgtgtcattgctctgcgaaagtggaacgccggtaaccagaacgtcgagactggtctgcgattcctgcgagagaacattgagggtattgtccacgaggacgagtacacccccattggtttccagatcatcttccccgccatgctcgaggaagctcgaggtctgggtctggagctcccctacgatctgacccccatcaagctcatgctgacccaccgagagaagatcatgaagggcaaggccattgaccacatgcacgagtacgactcctctctcatctacaccgtcgagggtatccacaagattgtcgactggaacaaggttctcaagcaccagaacaaggacggctctctcttcaactccccctctgccaccgcctgtgctctcatgcacacccgaaagtccaactgtctggagtacctctcttccatgctccagaagctcggtaacggtgtcccctccgtctaccccatcaacctctacgcccgaatctccatgattgaccgactccagcgactcggtctggcccgacacttccgaaacgagatcatccacgccctcgacgacatctaccgatactggatgcagaaggagacttctcgagagggcaagtctctcacccccgacattgtttccacctccattgccttcatgctgctgcgactccacggctacgatgtccccgctgacgttttctgctgctaccacctccactccattgagcagtccggtgaggctgtcactgccatgctgtctctgtaccgagcctcccagatcatgttccccggtgagactatcctcgaggagatcaagaccgtttcccgaaagtacctcgacaagcgaaaggagaacggtcgaatctactaccacaacattgtcatgaaggacctccgaggtgaggttgagtacgccctctccgtcccctggtacgcctctctcgagcgaatcgagaaccgacgatacattgaccagtacggtgtcaacgacacctggatcgccaagacctcttacaagatcccctgtatctccaacgatctgttcctggctctggccaagcaggactacaacatctgtcaggccatccagcagaaggagctccgagagctcgagcgatggttcgccgacaacaagttctcccacctcaactttgcccgacagaagctcatctactgctacttctccgctgctgccactctcttctctcccgagctctctgctgctcgagttgtctgggccaagaacggtgtcatcaccaccgttgttgacgacttcttcgatgttggtggctcctccgaggagatccactcttttgtcgaggctgtccgagtctgggatgaggctgccaccgacggtctgtccgagaacgtccagatcctcttctccgctctgtacaacaccgttgacgagattgtccagcaggcctttgtctttcagggccgagacatctccatccacctgcgagagatctggtaccgactcgtcaactccatgatgaccgaggcccagtgggcccgaacccactgcatcccctccatgcacgagtacatggagaacgccgagccttccattgctctcgagcccattgttctctcctctctctactttgtcggccccaagctgtccgaggagatcatctgccaccccgagtactacaacctcatgcacctgctcaacatctgtggccgactcctcaacgatatccagggctgcaagcgagaggcccaccagggcaagctcaactccgtcactctctacatggaggagaactccggcaccaccatggaggatgccattgtctacctgcgaaagaccatcgacgagtcccgacagctcctcctcaaagaggttctgcgaccttccattgtcccccgagagtgcaagcagctccactggaacatgatgcgaatcctccagctcttctacctcaagaacgacggtttcacctcccccaccgagatgctcggctacgtcaacgccgtcattgtcgaccccatattg

SEQ ID NO: 158 - DNA, 900 bp, Bradyrhizobium japonicum
atgatccagaccgagcgagccgtccagcaggttctcgagtggggtcgatctctgaccggctttgccgacgagcacgccgtcgaggccgtccgaggtggtcagtacatcctccagcgaatccacccctctctgcgaggtacctccgcccgaaccggccgagatccccaggacgagactctcattgtcaccttctaccgagagctcgctctgctcttctggctcgacgactgcaacgatctcggcctcatctcccccgagcagctcgccgccgtcgagcaggctctcggccagggtgtcccctgtgctctgcccggtttcgagggctgtgccgtcctccgagcttctctcgccaccctcgcctacgaccgacgagactacgcccagctcctcgacgacacccgatgctactccgctgctctgcgagctggtcacgcccaggctgttgctgccgagcgatggtcctacgccgagtacctccacaacggtatcgactccattgcctacgccaacgttttctgctgtctgtctctgctctggggcctcgacatggccactctgcgagcccgacccgccttccgacaggttctgcgactcatctccgccatcggtcgactccagaacgatctccacggctgcgacaaggaccgatccgccggtgaggctgacaacgccgtcattctgctcctccagcgataccccgccatgcccgttgtcgagttcctcaacgacgagctcgccggccacacccgaatgctgcaccgagtcatggccgaggagcgattccccgctccctggggtcctctcattgaggccatggctgccatccgagtccagtactaccgaacctccacctcccgataccgatccgatgccgtccgaggtggtcagcgagctcccgcc

SEQ ID NO: 159 - DNA, 2838 bp, Phaeosphaeria sp
atgttcgccaagttcgacatgctcgaggaagaggcccgagctctggtccgaaaggtcggtaacgccgtcgaccccatctacggtttctccaccacctcctgccagatctacgacaccgcctgggccgccatgatctccaaagaggagcacggtgacaaggtctggctcttccccgagtccttcaagtacctcctcgagaagcagggtgaggacggctcttgggagcgacacccccgatccaagaccgtcggtgttctcaacaccgccgccgcctgtctggctctcctccgacacgtcaagaaccccctgcagctgcaggacattgctgcccaggacatcgagctccgaatccagcgaggtctgcgatctctcgaggagcagctcatcgcctgggatgacgttctggacaccaaccacattggtgtcgagatgattgtccccgctctgctcgactacctccaggccgaggacgagaacgtcgacttcgagtttgagtcccactctctgctcatgcagatgtacaaggagaagatggcccgattctcccccgagtctctctaccgagctcgaccctcttctgctctgcacaacctcgaggctctcatcggtaagctcgatttcgacaaggtcggccaccacctctacaacggctccatgatggcctccccctcttccactgccgccttcctcatgcacgcctctccctggtcccacgaggccgaggcctacctccgacacgtctttgaggctggtaccggcaagggctccggtggtttccccggtacctaccccaccacctactttgagctcaactgggtcctctccaccctcatgaagtccggcttcactctctccgatctcgagtgcgacgagctctcctccattgccaacaccatcgccgagggtttcgagtgcgaccacggtgtcatcggtttcgctccccgagccgtcgacgttgatgacactgccaagggtctgctcaccctcaccctcctcggtatggacgagggtgtctcccccgctcccatgattgccatgttcgaggccaaggaccacttcctgaccttcctcggtgagcgagatccctccttcacctccaactgccacgttctgctctctctgctccaccgaaccgacctcctccagtacctcccccagatccgaaagaccaccaccttcctctgtgaggcctggtgggcctgcgacggccagatcaaggacaagtggcacctctcccacctctaccccaccatgctcatggtccaggcctttgccgagatcctcctcaagtccgccgagggtgagcctctgcacgacgcctttgacgccgccactctgtctcgagtctccatctgtgttttccaggcctgtctgcgaactctgctcgcccagtcccaggacggctcttggcacggccagcccgaggcttcttgctacgccgtcctcaccctcgccgagtccggccgacttgttctgctccaggctctgcagccccagattgctgctgccatggagaaggctgctgatgtcatgcaggctggtcgatggtcttgttccgaccacgactgtgactggacctccaagaccgcctaccgagtcgacctcgttgctgctgcttaccgactcgccgccatgaaggcctcttccaacctcaccttcaccgtcgacgacaacgtttccaagcgatccaacggtttccagcagctcgtcggccgaaccgacctcttctccggtgtccccgcctgggagctccaggcctctttcctcgagtccgctctgtttgtccctctgctccgaaaccaccgactcgatgtctttgaccgagatgatatcaaggtttccaaggaccactacctcgatatgatccccttcacctgggtcggctgcaacaaccgatctcgaacctacgtttccacctccttcctcttcgacatgatgatcatctccatgctcggctaccagattgacgagttcttcgaggctgaggctgcccccgccttcgcccagtgcatcggtcagctccaccaggttgttgacaaggtcgtcgacgaggtcattgacgaggttgtcgacaaggttgtcggtaaggtcgtcggtaaggtcgtcggcaaggtcgtcgacgagcgagtcgactcccccacccacgaggccatcgccatctgcaacatcgaggcttctctgcgacgattcgtcgaccacgttctccaccaccagcacgttctgcacgcctcccagcaggagcaggatatcctctggcgagagctccgagccttcctgcacgcccacgttgtccagatggccgacaactccactctcgctcctcccggccgaaccttctttgactgggtccgaaccactgctgccgaccacgttgcctgtgcctactccttcgccttcgcctgctgcatcacctccgccaccattggccagggccagtccatgtttgccaccgtcaacgagctctacctggtccaggctgctgcccgacacatgaccaccatgtgccgaatgtgcaacgacattggctccgtcgaccgagacttcattgaggccaacatcaactccgtccacttccccgagttctccactctgtctctcgttgctgacaagaagaaggctctggcccgactcgccgcctacgagaagtcttgtctgacccacaccctcgaccagtttgagaacgaggttctccagtctccccgagtctcctccgccgcctccggtgacttccgaacccgaaaggtcgccgttgtccgattcttcgccgatgtcactgacttctacgaccagctctacatcctccgagatctgtcctcctctctcaagcacgtcgggaca

SEQ ID NO: 160 - DNA, 2856 bp, Gibberella fujikuroi
atgcccggcaagattgagaacggtacccccaaggacctcaagaccggcaacgacttcgtttccgctgccaagtctctgctcgaccgagccttcaagtcccaccactcctactacggtctgtgctccacttcctgccaggtctacgacaccgcctgggttgccatgatccccaagacccgagacaacgtcaagcagtggctcttccccgagtgtttccactacctgctcaagacccaggctgctgacggctcttggggctctctgcccaccacccagaccgccggtatcctcgacactgcctccgccgttctggctctgctctgccacgcccaggagcctctgcagatcctcgatgtctcccccgatgagatgggtctgcgaatcgagcacggtgtcacttctctcaagcgacagctcgccgtctggaacgacgttgaggacaccaaccacattggtgtcgagttcatcatccccgctctgctctccatgctcgagaaggagctcgatgtcccctccttcgagttcccttgccgatccattctggagcgaatgcacggcgagaagctcggtcactttgatctcgagcaggtctacggcaagccctcttctctgctgcactctctcgaggccttcctcggcaagctcgatttcgaccgactctcccaccacctctaccacggctccatgatggcctccccctcttccaccgccgcctacctcattggtgccaccaagtgggacgacgaggccgaggactacctccgacacgtcatgcgaaacggtgccggccacggtaacggtggtatctctggtaccttccccaccacccactttgagtgctcctggatcattgccactctcctcaaggtcggtttcactctcaagcagattgacggtgacggtctgcgaggcctctccaccattctcctcgaggctctgcgtgacgagaacggtgtcattggcttcgctccccgaaccgccgacgttgatgacactgccaaggctctgctggctctgtctctggtcaaccagcccgtttcccccgacatcatgatcaaggttttcgagggtaaggaccacttcaccacctttggctccgagcgagatccctctctgacctccaacctccacgttctcctctctctgctcaagcagtccaacctgtctcagtaccacccccagatcctcaagaccactctcttcacctgtcgatggtggtggggctccgaccactgtgtcaaggacaagtggaacctctcccacctctaccccaccatgctcctcgtcgaggccttcaccgaggttctgcacctcatcgacggtggtgagctctcctctctgtttgacgagtctttcaagtgcaagatcggtctgtccatcttccaggccgttctccgaatcatcctcacccaggacaacgacggctcttggcgaggctaccgagagcagacctgttacgccattctcgccctcgtccaggcccgacacgtctgtttcttcacccacatggtcgaccgactccagtcctgtgtcgaccgaggtttctcttggctcaagtcttgctccttccactctcaggacctcacctggacctccaagaccgcttacgaggttggtttcgttgccgaggcctacaagctcgctgctctccagtccgcctctctcgaggtccccgctgccaccatcggccactccgtcacctctgctgtcccctcctccgatctcgagaagtacatgcgactcgtccgaaagaccgctctgttctctcccctcgatgagtggggtctgatggcctccatcatcgagtcctccttctttgtccccctcctccaggcccagcgagttgagatctacccccgagacaacatcaaggtcgacgaggacaagtacctctccatcatccccttcacctgggttggctgcaacaaccgatctcgaacctttgcctccaaccgatggctctacgacatgatgtacctgtctctgctcggctaccagaccgacgagtacatggaggccgttgccggccccgtctttggtgatgtctctctgctgcaccagaccatcgacaaggtcattgacaacaccatgggtaacctggcccgagccaacggtaccgtccactccggcaacggtcaccagcacgagtcccccaacattggccaggtcgaggacaccctcactcgatttaccaactccgtcctcaaccacaaggacgtcctcaactcctcctcctccgaccaggacaccctccgacgagagttccgaaccttcatgcacgcccacatcacccagatcgaggacaactcccgattctccaagcaggcttcttccgacgccttctcctcccccgagcagtcctacttccagtgggtcaactccactggtggttcccacgttgcctgcgcctactctttcgccttctccaactgcctcatgtccgccaacctcctccagggtaaggacgccttcccttccggtacccagaagtacctcatctcctccgtcatgcgacacgccaccaacatgtgccgaatgtacaacgatttcggttccatcgcccgagacaacgccgagcgaaacgtcaactccatccactttcccgagttcactctctgtaacggtacctcccagaacctcgacgagcgaaaggagcgactcctcaagattgctacttacgagcagggctacctcgaccgagctctcgaggctctggagcgacagtcccgagatgatgctggtgaccgagccggctccaaggacatgcgaaagctcaagattgtcaagctcttctgtgacgtcaccgacctctacgaccagctctacgtcatcaaggacctctcctcctccatgaaa

SEQ ID NO: 161 - DNA, 1533 bp, Lactuca sativa
atggatctgcagaccatggcccccatgggctctgctgccattgccatcggtggtcccgctgttgccgttgctggtggtatctctctgctcttcctcaagtctttcctgtcccagcagcccggcaaccccaaccacctcccctccgtccccgctgtccccggtgtccctctgctcggtaacctgctcgagctcaaggagaagaagccctacaagaccttcaccaagtgggccgagacttacggccccatctactccatcaagactggtgccacctccatggtcgttgtcaactccaaccagctcgccaaagaggccatggtcacccgattcgactccatctccacccgaaagctctccaaggctctccagattctcactgctgacaagaccatggttgccatgtccgactacgacgactaccacaagaccgtcaagcgaaacctgctcacctccatcctcggtcccgctgcccagaagcgacaccgagcccaccgagatgccatgggtgacaacctgtctcgacagctccacgctcttgctctcaactctcctcaagaggccatcaacttccgacagatcttccagtccgagctcttcactctcgccttcaagcagacctttggccgagacattgagtccatcttcgtcggtgatctcggtaccaccatgacccgagaggagatgttccagatcctcgttgtcgaccccatgatgggtgccattgacgttgactggcgagacttcttcccctacctcaagtggatccccaacgccaagctcgaggagaagattgagcagatgtacatccgacgaaaggccgtcatgaaggccgtcatccaggagcaccgaaagcgaattgactccggcgagaacctcgactcttacattgacttcctgctcgccgaggcccagcctctgaccgagaagcagctcctcatgtctctgtgggagcccatcattgagacttccgacaccaccatggtcaccaccgagtgggccatgtacgagctctccaagcaccccaacaagcagcagcgactctacaacgagatccgaaacatctgtggttccgagaagatcaccgaggagaagctctgcaagatgccctacctgtctgctgttttccacgagactctgcgagtccactcccccgtttccatcatccccctgcgatacgtccacgagaacaccgagctcggcggctaccacgtccccgccggcaccgagctcgccgtcaacatctacggctgcaacatggagcgagagatctgggagaaccccgaggagtggtcccccgagcgattcctcgccgagaacgagcccgtcaacctgcagaaaaccatggcctttggtgctggtaagcgagtctgcgctggtgccatgcaggccatgctgctcgcctgtgtcggtattggccgaatggtccaggagtttgagtggcgactcaaggacgacgttgaagaggatgtcaacaccctcggcctcaccacccagcgactcaaccccatgctcgccgtcatcaagccccggaat

SEQ ID NO: 162 - DNA, 1536 bp, Lactuca sativa
atggacggtgtcattgacatgcagaccatccccctgcgaactgccattgccattggtggtactgctgttgctctcgttgttgctctctacttctggttcctgcgatcttacgcctccccctctcaccactccaaccaccttcctcccgtccccgaggtccccggtgtccccgtcctcggtaacctgctccagctcaaggagaagaagccctacatgaccttcaccaagtgggccgagatgtacggccccatctactccatccgaaccggtgccacctccatggttgttgtctcttccaacgagattgccaaggaagttgttgtcacccgattcccctccatctccacccgaaagctctcttacgctctcaaggtcctcactgaggacaagtccatggttgccatgtccgactaccacgactaccacaagaccgtcaagcgacacattctcaccgccgtcctcggccccaacgcccagaagaagttccgagcccaccgagacaccatgatggagaacgtttccaacgagctccacgccttcttcgagaagaaccccaaccaggaagtcaacctgcgaaagatcttccagtctcagctctttggtctggccatgaagcaggctctcggcaaggatgtcgagtccatctacgtcaaggatctcgagactaccatgaagcgagaggagatcttcgaggttctggtcgtcgaccccatgatgggtgccattgaggtcgactggcgagacttcttcccctacctcaagtgggtccccaacaagtctttcgagaacatcatccaccgaatgtacacccgacgagaggctgtcatgaaggctctcatccaggagcacaagaagcgaattgcctccggtgagaacctcaactcctacattgactacctgctctccgaggcccagaccctcaccgacaagcagctcctcatgtctctgtgggagcccatcatcgagtcctccgacaccaccatggtcaccaccgagtgggccatgtacgagctcgccaagaaccccaacatgcaggaccgactctacgaggagatccagtctgtctgtggctccgagaagatcactgaggagaacctgtcccagctcccctacctctacgccgttttccaggagactctgcgaaagcactgccccgtccccatcatgcccctgcgatacgtccacgagaacaccgtcctcggtggctaccacgtccccgctggtaccgaggttgccatcaacatctacggctgcaacatggacaagaaggtctgggagaaccccgaggagtggaaccccgagcgattcctgtccgagaaggagtccatggacctctacaagaccatggcctttggtggtggcaagcgagtctgtgccggctctctgcaggccatggtcatctcctgcattggtatcggtcgactcgtccaggactttgagtggaagctcaaggacgatgctgaggaagatgtcaacaccctcggcctcaccacccagaagctccaccctctgctcgccctcatcaacccccggaaa

SEQ ID NO: 163 - DNA, 1575 bp, Sphaceloma manihoticola
atgatggacgacaccacctccccctactccacctaccactccgtccgatccatccgaaaccagtccgcctgggctctggcccccattgccgtctttatctgctacgttgttctgcgacacaaccgaaagtccgtccccgctgcctctgctggttcccactccatcctcgagcccctgtggctcgcccgactccgattcatccgagactctcgattcatcatcggtcagggctactccaagttcaaggacaccatcttcaaggtcaccaaggtcggtgccgatatcattgttgttgctcccaagtacgtcgaggagatccgacgactctcccgagacaccggccgatccgtcgagcccttcatccacgactttgccggtgagctcctcggtggcctcaacttcctcgagtccgatctccagacccgagttgtccagcagaagctcacccccaacctcaagaccattgtccccgtcatggaggacgagatgcactacgctctcgtttccgagctcgactcttgtctcgatggttccgagcactggacccgagtcgacatgatccacatgctctcccgaattgtctctcgaatctccgcccgaatcttcctcggccccaagtactgccgaaacgatctgtggctcaagaccactgccgagtacaccgagaacctcttcctgaccggtactctgctccgattcgtcccccgaatgctccagaagtggatcgctcctctgctcccctctttccgacagctccaggagaaccgacaggccgcccgaaagatcatctccgagattctgaccgaccaccagcccgagaagcacgacgagacttccgacaacggtgacccctaccccgacattctcaccctcatgttccaggctgcccgaggtaaggagaaggacattgaggacattgcccagcacactctgctcctctctctgtcctccatccacaccactgctctgaccatgacccaggctctctacgatctctgtgcctacccccagtacctcgaccccgtcaagcacgagattgccgacactctgcagtccgagggctcttggtccaaggccatgctcgacaagctccacatgatggactctctgctccgagagtcccagcgactctctcccgtctttctgctcaccttcaaccgaatcctccacacccctctgaccctctccaacggtatccacctccccaagggtacccgaattgccgccccctccgacgccatcctcaacgacccctctctggtccccggcccccagcccgctgacaccttcgaccccttccgatacatcaaccactccaccggtgatgccaagaaaaccaagaccaacttccagaccacctctctgcagaacatggcctttggctacggtaagtacgcctgccccggccgattctacgttgccaacgagatcaagctcgttctcggccacctgctcatgcactacgagttcaagttccctcccggtatgggccgacccgtcaactccactgtcgacaccgacatgtaccccgatctcggtgcccgactcctcgtccgaaagcgaaagatggaggag

SEQ ID NO: 164 - DNA, 1440 bp, Artemisia annua
atgcccatgaccgtcatgctgctctttgttttcctgctcttcattgccatctgtttcttcctcgtccaccgacacaactccaccaccaccaagaacctgcctcccggctccttcggctggcccttcattggtgagactctcgcctacatccgatccaagcgaggtggtgaccccgagcgattcaccaaggagcgaatcgagaagtacggctccactctggtctttaagacctccgttgccggtgagcgaatggccgttttctgcggtcccgagggtaacaagttcctctttggcaacgagaacaagctcgttgcttcttggtggcccaactccgtccgaattctcttcgagaagtgtctgatcaccatccgaggtgacgaggccaagtggctccgaaagatgatgttcgcctacctcggtcccgatgctctgtccaaccgatacaccggtaccatggaggttgtcacccgactccacatccagaaccactggcagggcaagtccgagctcaaggtctttgagactgtccgaccttacctcttcgagctcgcctgccgactcttcctgtctctcgacgaccccaagcacgttgccgagctcggtaccctcttcaacaccttcctcaagggtctgaccgagctccccatcaacatccccggtacccgattctaccgagccaagcgagctgccaacgccatcaagaagcagctcattgtcatcatcaagcagcgacgacaggctctcaagcaagaggaccagtcctcctccttcgaggacctcctctcccacctccttgtctcctccgacgagaacggccgattcctgtccgaggctgagattgccaacaacgttctgctcctcctcttcgccggccacgacacttctgctgtctccatcactctgctcatgaagtctctggccgagcacccccaggtctacgacaacgtcctcaaggagcagctcggtattctcgaggccaaggctcccggtgagatgctcaactgggaggatatccagaagatgcgatactcttggtacgttgtctgcgaggtcatgcgactcattcctcccgttgtcggctctttccgagaggctctggtcgactttgagtacgccggctacaccatccccaagggctggaagatcatctggtccgccgtcatgacccacaaagaggagaacaacttccccaacgccaccaagttcgacccctctcgattcgagggtgctggtcccacccccttcacctacgtccccttcggtggtggcccccgaatgtgcctcggcaaggagctcgcccgagtccgaatcctcgtctttctgcacaacatcatgaccaagttcaagtgggatctgctcatccccgacgagaagattggctacgaccccctcgccacccccgtcaagggtctgcccgtccgactccacccccaccaggtt

SEQ ID NO: 165 - DNA, 1365 bp, Ricinus communis
atggagctcgtcatgttccccgttctggctctcgtttccactctcttcctgctcgccctccacttcatcatccgaaccctcaaggagcgactctttggctctcccaacctgcctcccggccgactcggctggcccctcattggtgagactcccgccttcttccgagctggctttgaggccaagcccgagaagttcatcggtgagcgaatggagaagtacgactcccgagtctttaagacctctctgctcggcaagcccttcgccgtcatctccggtaccgccggccacaagttcctcttctccaacgagaacaagctcgtcaacctgtggtggcccgagtccgtccgaatgctcttcaagtctgctctcgtttccgttgtcggtgacgaggccaagcgaatccgaaagatgctcatgaccttcctcggcctcgatgctctcaagaactacaccgagcgaattgacatggtcacccagcagcacatccgaacctactgggagggtaaagaggaagtcaccgtctactccactctcaagctctacaccttcactctggcctgcaacctcttcgcctccatcaacgaccccgagcgactctccaagctcggtgcccacttcgacgtctttgtcaagggtgtcatctctctgcccatctccatccccggtacccgactctacaagtccatgaaggctgccaacgccatccgagaggagctcaagctcattgtccgagatcgaaaagaggctctcgagcgaaagatggcctcccccacccaggatctgctctcctacctgctcgtcgactccgacaccaacggccgattcctgtccgagatggagattctcgacaacatcatgctgctcctctacgctgagcagctcgagattgccaactccaagaagcccggtgagctgctccagtgggaggacgtccagaagatgcgatactcttggaacgtcatctccgaggttctgcgactgtctcctcccgtttcttctgcctaccgacacgccattgttgacttcacctacgagggttacaccatccccaagggctggcagctcttcacctccttcggtaccacccaccgagatcccgctctcttccccaaccccgagcgattcgacgcctctcgattcgagggtaacggtcctccctcctactcctacatccccttcggtggtggtccccgaatgtgcattggctacgagtttgcccgactcgagatgctcatcttcctgcacaacatcatcaagcgattcaagtgggacattctcatccccgacgagcagtttggctacaaccccctgctcgccccctcccagggtttccccgtccgactgcgaccccaccactcccatctc

SEQ ID NO: 166 - DNA, 1428 bp, Stevia rebaudiana
atgatccaggttctgacccccatcctcctcttcctcatcttcttcgttttctggaaggtctacaagcaccaaaagaccaagatcaacctgccccctggctccttcggctggcccttcctcggtgagactcttgctctgctccgagccggctgggactccgagcccgagcgattcgtccgagagcgaatcaagaagcacggctctcctctcgttttcaagacctctctcttcggtgaccgattcgccgttctctgtggtcccgctggtaacaagttcctcttctgcaacgagaacaagctcgttgcctcttggtggcccgtccccgtccgaaagctcttcggcaagtctctgctcaccatccgaggtgacgaggccaagtggatgcgaaagatgctgctctcctacctcggtcccgatgcctttgccacccactacgctgtcaccatggacgttgtcacccgacgacacattgacgtccactggcgaggcaaggaagaggtcaacgttttccagaccgtcaagctctacgcctttgagctcgcctgccgactcttcatgaacctcgacgaccccaaccacattgccaagctcggctctctcttcaacatcttcctcaagggtatcatcgagctccccattgacgttcccggtacccgattctactcctccaagaaggctgctgctgccatccgaatcgagctcaagaagctcatcaaggcccgaaagctcgagctcaaggaaggcaaggcctcctcctcccaggatctgctgtcccacctgctcacctcccccgacgagaacggtatgttcctgaccgaggaagagattgtcgacaacattctgctcctcctctttgccggccacgacacctctgctctgtccatcactctgctcatgaaaactctcggtgagcactccgatgtctacgacaaggtcctcaaggagcagctcgagatctccaagactaaagaggcctgggagtctctcaagtgggaggacatccagaagatgaagtactcctggtccgtcatctgcgaggtcatgcgactcaaccctcccgtcatcggtacctaccgagaggctctggtcgacattgactacgccggctacaccatccccaagggctggaagctccactggtccgctgtctccacccagcgagatgaggccaactttgaggacgtcacccgattcgacccctctcgattcgagggtgccggtcccactcccttcacctttgtccccttcggtggtggtccccgaatgtgtctcggcaaggagtttgcccgactcgaggttctggccttcctgcacaacattgtcaccaacttcaagtgggatctgctcatccccgacgagaagattgagtacgaccccatggccacccccgccaagggtctgcccatccgactccacccccaccaggtg

SEQ ID NO: 167 - DNA, 1575 bp, Arabidopsis thaliana
atggagtctctggttgtccacaccgtcaacgccatctggtgcattgtcattgtcggtatcttctccgtcggctaccacgtctacggccgagctgttgtcgagcagtggcgaatgcgacgatctctcaagctccagggtgtcaagggtcctcctccctccatcttcaacggtaacgtttccgagatgcagcgaatccagtccgaggccaagcactgctccggtgacaacatcatctcccacgactactcttcttctctgttcccccactttgaccactggcgaaagcagtacggccgaatctacacctactccactggcctcaagcagcacctctacatcaaccaccccgagatggtcaaggagctctcccagaccaacaccctcaacctcggccgaatcacccacatcaccaagcgactcaaccccattctcggtaacggtatcatcacctccaacggcccccactgggcccaccagcgacgaatcattgcctacgagttcacccacgacaagatcaagggtatggtcggtctgatggtcgagtccgccatgcccatgctcaacaagtgggaggagatggtcaagcgaggtggtgagatgggctgtgacatccgagtcgacgaggacctcaaggatgtctccgctgacgtcattgccaaggcctgtttcggctcttccttctccaagggcaaggccatcttctccatgatccgagatctgctcaccgccatcaccaagcgatccgtcctcttccgattcaacggtttcaccgacatggttttcggctccaagaagcacggtgacgttgacattgacgctctcgagatggagctcgagtcctccatctgggagactgtcaaggagcgagagattgagtgcaaggacacccacaagaaggacctcatgcagctcattctcgagggtgccatgcgatcttgtgacggtaacctgtgggacaagtctgcttaccgacgattcgttgtcgacaactgcaagtccatctactttgccggccacgactccaccgccgtttccgtttcttggtgcctcatgctgctcgctctcaacccctcttggcaggtcaagatccgagatgagattctgtcctcctgcaagaacggtatccccgacgccgagtccatccccaacctcaagaccgtcaccatggtcatccaggagactatgcgactctaccctcccgctcccattgtcggccgagaggcctccaaggacattcgactcggtgatctggttgtccccaagggtgtctgtatctggaccctcatccccgctctgcaccgagatcccgagatctggggtcccgacgccaacgacttcaagcccgagcgattctccgagggtatctccaaggcctgcaagtacccccagtcctacatcccctttggcctcggcccccgaacctgtgtcggcaagaactttggtatgatggaggtcaaggtcctcgtttctctgattgtctccaagttctccttcactctgtctcccacctaccagcactctccctcccacaagctgctcgtcgagccccagcacggtgttgtcatccgagttgta

SEQ ID NO: 168 - DNA, 1437 bp, Ixeris dentata
atggacgccgttgccgtcaactccgagactatgtcccacgttgtctttatccccttccccgcccagtcccacatcaagtgcatgctcaagctcgcccgactgctgcaccacaagggtctgcacatcacctttgtcaacaccgagctcaaccacaaccagctgctgtcctccggtggtcccaactctctcgacggtgagcccggtttccgattcaagaccatccccgatggtgtccccgagggtgctcccgacttcatgtacgctctgtgtgactccgttctcaacaagatgctcgaccccttcgtcgatctcattggccgactcgagtcccccgccacctgtatcatcggtgacggtatgatgcccttcactgttgctgctgccgagaagctcaagctccccatcatgcacttctggaccttccccgctgctgccttcctcggctactaccaggcccccaacctcattgagaagggcttcatccctcccaaggacgagtcttggtccaccaacggctacctcgagactgttgtcgactccatctccggtctggagggtttccgaatccgagacatccccgcctacttccgaaccaccgaccccaacgactccgacttcaactacatcattgagtgtgtcaaggccatccgaaaggtttccaacattgttctccacacctttgaggagctcgagtccaccatcatcaaggctctgcagcccatgatcccccacgtctacaccattggccccctcgagctcctcctcaaccccatcaagctcgaagaggagactgagaagctcgatatcaagggctactctctgtggaaggaagatgacgagtgcctcaagtggctcgactccaaggagcccaactccgtcatctacgtcaacttcggctctctcatctccatgtccaaggagcagctcgccgagtttggctggggtctggtcaactccaaccactgcttcctctgggtcatccgacgagatctggttgtcggtgactctgctcctctgcctcccgagctcaaggagcgaatcaacgagcgaggtttcattgcctcttggtgcccccaggagaaggtcctcaagcactcctccgtcggtggtttcctcacccactgtggctggggctccatcatcgagtctctgtccgccggtgtccccatgctctgctggccctacctctgggaccagcccaccaactgccgacaggcctgcaaggagtgggaggtcggtctggagattgagggtaacgtcaacaaggacgaggtcgagcgactcacccgagagctcattggtggtgagaagggcaagcagatgcgatccaaggccctcgagtggaagaagaagattgagattgccaccggccccaagggctcttcttctctcaacgtcgagcgactggccaacgacatcaacatgttctcccgaaat

SEQ ID NO: 169 - DNA, 1446 bp, Ricinus communis
atgggctccattgtccgagatcacgacaagccccacgttgtctgtgtcccctaccccgcccagggccacgtcaaccccatggtcaagctcgccaagctcctccactacaacgacttccacgtcacctttgtcaacaccgagtacaaccaccgacgactcctcaactcccgaggcccctcttctctcgacggcctccccgacttccgattcgaggccatctccgacggtctgcccccttccgacgccaacgccacccaggatatcccctctctctgtgactccacctccaagaactctctggcccccttccgaaacctgctgctcaagctcaagtcctccgactctctgcctcccgtcacctgtatcatctccgacgcctgcatgtccttcaccctcgatgctgctgaggagttcggtatccccgagatcctcttctggaccccctcttcttgtggtgttctcggctactcccagtaccacactctcattgagaagggtctgactcccctcaaggacgcctcctacctgaccaacggctacctcgagactaccctcgactggatccccggtatgaaggacatccgattccgagatctgccctctttcatccgaaccaccgaccgaaacgacatcatgctcaacttcgttgtccgagagctcgagcgaacctcccgagcctctgctgttgttttcaacaccttctacgcctttgagaaggacgttctcgacgttctgtccaccatgttccctcccatctactccatcggtcccctccagctcctcgtcgaccagatccccattgaccgaaacctcggtaacattggctccaacctgtggaaggagcagcccgagtgcattgactggctcgacaccaaggagcccaactccgttgtctacgtcaactttggctccatcaccgtcatcactccccagcagatgattgagtttgcctggggtctggcctcttccaagaagcccttcctgtggatcatccgacccgatctggtcattggtgagaacgccatgctccccgctgagtttgtctccgagactaaggaccgaggtatgctcgcctcttggggtccccaggagcagatcctcaagcaccccgctgtcggtggtttcctgtcccacatgggctggaactccaccctcgactccatgtccggtggtgtccccatggtctgctggcccttcttcgccgagcagcagaccaactgccgattcgcctgcaccgagtggggtgtcggtatggagattgacaacaacgtcaagcgagatgaggtcaagaagctcgttgaggtcctcatggacggcaagaagggcaaggagatgaagtccaaggccatggagtggaaaaccaaggctgaggaagctgccaagcccggtggttcctcccacaacaacctcgaccgactcgtcaagttcatcaagggccagaagaat

SEQ ID NO: 170 - DNA, 1374 bp, Ixeris dentata
atggccgaggagcacaacaagaccaacaactcctctccccacgttgtcatcttccccttcccctcccagggccacatcaaccccctcatccagtttgccaagcgactctcctccaagggtgtcaagcccactctcatcaccaccatctacattgccaagacctctccttaccccaactcctccattgttgtcgagcccatctccgacggtttcgacgacggtggtttcaagtccgccacctccgctgagtcctacattgacaccttccaccaggtcggctccaagtctctggccaacctcatccgaaagctcgtcaacgagggcaaccacgttgatgccatcatctacgactccttcgtcacctgggctctcgatgttgccatggagtacggtattgacggtggctgcttcttcacccaggcctgtgccgtcaacaacatctactaccacgtctacaagggtgtcctcgagatccccctgcaggctgctgctcctcccaccgtcaccattctgctccccgagctcccccagctccagctgtgggagactccctcttttgtccacaaccccggcccctaccccggctgggcccacattgtctttaaccagttccccaacatccacaacgcccgatgggttttctccaacaccttcttcaagctcgaggagcaggtcatcaagtggatgcgactcatgtggcctctcatggtcgtcggtcccaccgtcccctccatgtacctcgacaagcgactcgaggacgacgacgactacggtatgtctctgctcaagcccaaccacattgagtgcatgggctggctcaacaacaagcccaagggctccgtcgtctacgtttctttcggctcttacggtgagctcggtgttgcccagatggaggagattgcctggggtctgaacgagtcctccgtcaactacctgtgggttgtccgagagactgagaaggagaagctccccaagtccttcctggccaacggtctgattgtcgagtggtgccgacagctcgaggtcctcgcccacgaggctgttggctgtttcgtcacccactgcggtttcaactcctctctcgagactatctctctcggtgtccccgttgttgccatcccccagtggaccgaccagaccaccaacgccaagtgcctcgaggatatctggggtgtcggtatccgagccaagacccccgtcacccgaaccaacctggtctggtgcatcaaggagatcatggagggtgagcgaggtgctgttgctcgaaagaacgccatcaagtggaaggatctggccattgaggctgtctcccccggcggctcttccgacaaggacatcaacgagtttgtctcccagctctcccccatcaagtgt

SEQ ID NO: 171 - DNA, 1362 bp, Populus trichocarpa
atggacaacaagaagtcccacgtcattgttctgacctaccccgcccagggccacatcaaccccctgctccagtttgccaagcgactcgcctccaagggcctcaaggccactctggccaccacctactacaccgtcaactccatcgacgcccccaccgtcggtgttgagcccatctccgacggtttcgacgagggtggtttcaagcaggcttcttctctcgatgtctacctcgagtccttcaagaccgtcggctcccgaactctgaccgagctcgttttcaagttcaaggcttccggctctcccgtcaactgtgttgtctacgactccatgctcccctgggccctcgacgttgctcgagatctcggtatctacgctgctgccttcatgaccacctctgcttccgtctgctccatgtactggcgaatcgatctcggtctgctgtctctgcccctcaagcagcagaccgccactgtctctctgcccggtctgccccctctcggctgctgtgacctcccctctttcctcgccgagcccacctcccagaccgcctacctcgaggtcatcatggagaagttccactctctcaacgaggacgactgggttttctgcaactccttcgaggacctcgagattgagctcgtcaaggccatgcgaggcaagtggcccctcgtcatggtcggccccatggtcccctccgcctacctcgaccagcagatcgacggtgaccgagcctacggtgcttctctgtggaagcccacctcctcccagtgcttcacctggctcgacaccaagccccctcgatccgtcatctacgtttccttcggctccatgggcaacatctccgccgagcaggttgaggagattgcctggggcctcaaggcttccaaccgacccttcctgtgggtcatgaaggagtccgagaagaagctccccaccggtttcctcaactccgtcggtgagactggtatggttgtctcttggtgcaaccagctcgaggttctcgcccaccaggccattggctgctttgtcacccactgtggctggaactccactctcgagggtctgggcctcggtgtccccatggtctgtgtcaccgagcgatccgaccagcccatgaacgccaagttcgtcgaggatgtctggaaggtcggtgtccgagccaagaaggacgaggttggtattgtcacccgagaggagctcgagaagtgcatccgaggtgtcatggacggtgagaacggtgaggagatcaagcgaaacgccaacaagtggcgagagctcgcccgatctgctgtttccgtcggtggttcctccgacatgaacatcaacgagtttgttgtcaagctgctcgagggcaagaaggga

SEQ ID NO: 172 - DNA, 1377 bp, Nicotiana tabacum
atgaccacccagaaggcccactgtctgatcctcccctaccccgcccagggccacatcaaccccatgctccagttctccaagcgactccagtccaagggtgtcaagatcaccattgctgccaccaagtctttcctcaagaccatgcaggagctgtccacctctgtctccgtcgaggccatctccgacggctacgacgacggtggccgagagcaggctggtacctttgtcgcctacatcacccgattcaaagaggttggctccgacactctgtcccagctcatcggtaagctcaccaactgtggctgccctgtctcttgcattgtctacgaccccttcctgccctgggctgtcgaggtcggtaacaacttcggtgttgccactgctgccttcttcacccagtcttgtgccgtcgacaacatctactaccacgtccacaagggtgttctcaagctccctcccaccgacgttgacaaggagatctccatccccggtctgctcaccattgaggcttccgatgtcccctcttttgtctccaaccccgagtcctcccgaatcctcgagatgctcgtcaaccagttctccaacctcgagaacaccgactgggttctcatcaactccttctacgagctcgagaaggaagtcattgactggatggccaagatctaccccatcaagaccattggccccaccatcccctccatgtacctcgacaagcgactccccgatgacaaggagtacggtctgtccgtctttaagcccatgaccaacgcctgcctcaactggctcaaccaccagcccgtttcttccgtcgtctacgtttctttcggctctctggccaagctcgaggctgagcagatggaggagctcgcctggggtctgtccaactccaacaagaacttcctgtgggttgtccgatccactgaggagtccaagctccccaacaacttcctcgaggagctcgcctccgagaagggtctggttgtctcttggtgcccccagctccaggttctcgagcacaagtccatcggttgcttcctgacccactgcggctggaactccactctcgaggccatctctctcggtgtccccatgattgccatgccccactggtccgaccagcccaccaacgccaagctcgtcgaggatgtctgggagatgggtatccgacccaagcaggatgagaagggtctggtccgacgagaggtcattgaggagtgtatcaagattgtcatggaggagaagaagggcaagaagatccgagagaacgccaagaagtggaaggagctcgcccgaaaggctgttgacgagggtggctcttccgaccgaaacattgaggagttcgtttccaagctcgtcaccatcgcttccgtcgaatcg

SEQ ID NO: 173 - DNA, 1434 bp, Vaccaria hispanica
atgtccaacaacgagaacaacgccacccaggtcattgttctgccctaccacggccagggccacatgaacaccatggtccagtttgccaagcgactcgcctggaagggtgtccacgtcaccatcgccaccaccttcaacaccatccagcagatgaagctcaacatctcctcttacaactccatcactctcgagcccatctacgacgacaccgacgactccactctgcacatcaaggaccgaatggcccgattcgaggctgaggctgcctccaacctgacccgagttctcgaggccaagaagcagcagcaggctctcaacaagaagtgtctgctcgtctaccacggctctctcaactgggccctcgttgtcgcccaccagcagaacgttgccggtgctgccttcttcaccgccgcctctgcttctttcgcctgctactactacctgcacctcgagtcccagggcaagggtgtcgatctcgaggagctcccctccattctgccccctcccaaggtcatcgtccagaagctccccaagtccttcctggcctacggtgacaacaactcccacaacaacaacaataacaacaataacaacaacaataacaacaacatgggtctgcaccctctggttctgtggctcctcaaggactacggcaactccgtcaaggccgactttgtcctcctcaactccttcgacaagctcgaggaagaggccatcaagtggatctccaacatctgctccgtcaagaccatcggtcccaccatcccctccacctacctcgacaagcagatcgagaacgatgtcgactacggtttcaaccagtacaagcccaccaacgaggactgcatgaagtggctcgacaccaaggaagccaactccgttgtctacattgccttcggctctgttgctcgactgtccgtcgagcagatggccgagattgccaaggctctcgaccactcctccaagtctttcatctgggttgtccgagagactgagaaggagaagctccccgtcgacctcgtcgagaagatctccggccagggtatggttgtcccctgggctccccagctcgaggtcctcgcccacgatgctgtcggctgtttcgtttcccactgtggctggaactccaccattgaggctctgtctttcggtgtccccatcctcgccatgccccagttcctcgaccagctcgttgatgcccactttgtcgaccgagtctggggtgtcggtattgcccccactgtcgacgagaacgatctcgtcacccaggaagagatctcccgatgcctcgacgagatgatgggtggtggtcccgagggtgagaagatcaagaagaacgttgccatgtggaaggagctgaccaaagaggctctcgacaagggtggctcttccgacaagcacattgacgagatcattgagtggctctcttctagt

SEQ ID NO: 174 - DNA, 1443 bp, Streptococcus mutans
atgcccatcatcaacaagaccatgctcatcacctacgccgactctctcggcaagaacctcaaggagctcaacgagaacattgagaactacttcggtgatgctgttggtggtgtccacctgctccccttcttcccctccactggtgaccgaggcttcgcccccattgactaccacgaggttgactctgccttcggtgactgggatgatgtcaagtgcctcggtgagaagtactacctcatgttcgacttcatgatcaaccacatctcccgacagtccaagtactacaaggactaccaggagaagcacgaggcttctgcctacaaggacctcttcctcaactgggacaagttctggcccaagaaccgacctacccaggaagatgtcgatctcatctacaagcgaaaggaccgagctcccaagcaggagatccagtttgccgacggctccgtcgagcacctgtggaacaccttcggtgaggagcagattgacctcgatgtcaccaaggaagtcaccatggacttcatccgatccaccattgagaacctggctgccaacggctgtgacctcatccgactcgacgcctttgcctacgccgtcaagaagctcgacaccaacgacttcttcgtcgagcccgagatctggactctgctcgacaaggtccgagacattgctgccgtttccggtgccgagatcctccccgagatccacgagcactacaccatccagttcaagattgctgaccacgactactacgtctacgactttgctctgcccatggtcactctgtactctctgtactcctccaaggtcgaccgactcgccaagtggctcaagatgtctcccatgaagcagttcaccaccctcgacacccacgacggtatcggtgttgttgatgtcaaggacattctgaccgacgaggagatcacctacacctccaacgagctctacaaggtcggtgccaacgtcaaccgaaagtactccactgccgagtacaacaacctcgatatctaccagatcaactccacctactactctgctctcggtgacgacgaccagaagtacttcctggcccgactcatccaggcctttgcccccggtatcccccaggtctactacgttggcttcctcgccggcaagaacgatctcgagctgctcgagtccaccaaagagggccgaaacatcaaccgacactactactcctccgaggagattgctaaagaggtcaagcgacccgttgtcaaggctctgctcaacctcttcacctaccgaaaccagtccgccgcctttgacctcgacggccgaatcgaggttgagactcccaacgaggccaccattgtcatcgagcgacagaacaaggacggctctcacattgccaaggccgagatcaacctgcaggacatgacctaccgagtcaccgagaacgaccagaccatctccttcgag

SEQ ID NO: 175 - DNA, 1392 bp, Lobelia erinus
atggacaacaaccacctcggtgagactctgctccccctcgctcccaagaacggccgacgagttctcttcttcccctaccccctccagggccacatctcccccatgctcaacctcgccaacctgctccactccaagggtttcaccatcaccatcatccacaccaacctcaactcccccaaccagtccgactacccccacttcaccttccgaccctttgacgacggtttccctccttactccaagggctggcagctcgccaccctctgctcccgatgtgtcgagcccttccgagagtgtctggcccagatcttcctgtccgaccacaccgcccccgagggtgagcgagagtccattgcctgcctcattgccgatggtctgtggaacttcctcggtgctgccgtctacaacttcaagctccccatgattgttctgcgaaccggtaacatgtccaacattgttgccaacgtcaagctcccctgcttcatcgagaagggctactttgaccacaccaaggaaggctccaagctcgaggctgccgtccccgagttccccaccatcaagttcaaggacattctcaagacctacggctccaaccccaaggccatctgtgagactctgaccgctctgctcaaggagatgcgagcttcttccggtgtcatctggaactcctgcaaggagctcgagcagtccgagctccagatgatctgcaaggagttccccgtcccccacttcctcatcggtcctctgcacaagtacttccccgcctcttcttcttctctcgttgcccacgacccctcttccatctcttggctcaactccaaggctcccaactccgtcctctacgtttcttttggctccatctcctccatggacgaggctgagttcctcgagactgcctggggtctggccaactccatgcagcagttcctgtgggttgtccgacccggctccgtccgaggttcccagtggctcgagtctctgcccgatggtttcattgacaagctcgacggccgaggccacattgtcaagtgggctccccagcaagaggttctcgcccaccaggccaccggtggtttctggacccactgtggctggaactccactctcgagtccatgtgcgagggtgtccccatgatctgctcccacggtatcatggaccagcccatcaacgcccgatacgtcaccgatgtctggaaggtcggtatcgagctcgagaagggctttgactccgaggagatcaagatggccatccgacgactcatggtcgataaagagggccaggagatccgagagcgatcttctcgactcaaggagtctctgtccaactgtctcaagcagggtggttcctcccacgactccgtcgagtctctggtcgaccacattctcagcttc

SEQ ID NO: 176 - DNA, 1380 bp, Arabidopsis thaliana
atggaggagcgaaagggccgacgaatcatcatgttccctctgcccttccccggccacttcaaccccatgatcgagctcgctggtatcttccaccaccgaggcttctccgtcaccatcctccacacctcctacaacttccccgacccctctcgacacccccacttcaccttccgaaccatctcccacaacaaggaaggcgaagaggaccccctgtcccagtccgagacttcttccatggacctcattgttctcgtccgacgactcaagcagcgatacgctgagcccttccgaaagtccgttgctgctgaggtcggtggtggtgagactgtctgctgcctcgtttccgatgccatctggggtaagaacaccgaggttgttgccgaggagattggtgtccgacgagttgtcctccgaaccggtggtgcctcttctttctgcgcctttgctgctttccctctgctccgagacaagggctacctccccatccaggactcccgactcgacgagcccgtcaccgagctgccccctctcaaggtcaaggatctgcccgtcatggagactaacgagcccgaggagctctaccgagttgtcaacgacatggtcgagggtgccaagtcctcttccggtgtcatctggaacacctttgaggatctcgagcgactctctctcatgaactgctcctccaagctccaggtccccttcttccccatcggtcccttccacaagtactccgaggaccccacccccaagaccgagaacaaggaagataccgactggctcgacaagcaggacccccagtccgttgtctacgcctcttttggctctctcgccgccatcgaggagaaggagttcctcgagattgcctggggtctgcgaaactccgagcgacccttcctgtgggttgtccgacccggctccgtccgaggcaccgagtggctcgagtctctgcccctcggcttcatggagaacattggtgacaagggcaagatcgtcaagtgggccaaccagctcgaggttctggcccaccccgccatcggtgccttctggacccactgtggctggaactccactctcgagtccatctgtgagggtgtccccatgatctgcacctcttgtttcaccgaccagcacgtcaacgcccgatacattgtcgatgtctggcgagtcggtatgctgctcgagcgatccaagatggagaagaaggagattgagaaggtcctccgatccgtcatgatggagaagggtgacggtctgcgagagcgatctctcaagctcaaggagcgagccgacttctgcctctccaaggacggctcctcctccaagtacctcgacaagcttgtctcccacgttctgtcttttgactcctacgcctttgcatcc

SEQ ID NO: 177 - DNA, 2139 bp, Gibberella fujikuroi
atggctgagctcgacactctcgacattgttgttctcggtgtcatcttcctcggtaccgttgcctacttcaccaagggtaagctgtggggtgtcaccaaggacccctacgccaacggctttgctgctggtggtgcctccaagcccggccgaacccgaaacattgttgaggccatggaggagtccggcaagaactgtgttgttttctacggctcccagaccggcaccgccgaggactacgcctctcgactggccaaggaaggcaagtctcgattcggtctgaacaccatgatcgctgatctcgaggactacgactttgacaacctggacaccgtcccctccgacaacatcgtcatgtttgtcctggccacctacggtgagggtgagcccaccgacaacgccgtcgacttctacgagttcatcaccggtgaggacgcttctttcaacgagggtaacgaccctcctctcggcaacctcaactacgttgccttcggtctgggcaacaacacctacgagcactacaactccatggtccgaaacgtcaacaaggctctcgagaagctcggcgcccaccgaatcggtgaggctggtgagggtgacgacggtgccggtaccatggaggaagatttcctggcctggaaggaccccatgtgggaggctctcgccaagaagatgggcctcgaggagcgagaggccgtctacgagcccatctttgccatcaacgagcgagatgatctcacccccgaggccaacgaggtctacctcggtgagcccaacaagctccacctcgagggtaccgccaagggccccttcaactcccacaacccctacattgcccccattgctgagtcctacgagctgttctccgccaaggaccgaaactgtctgcacatggagattgacatctccggctccaacctcaagtacgagactggtgaccacatcgccatctggcccaccaaccccggtgaagaggtcaacaagttcctcgacatcctcgatctctccggcaagcagcactctgttgtcaccgtcaaggctctcgagcccaccgccaaggtccccttccccaaccccaccacctacgacgccatcctgcgataccacctcgagatctgtgcccccgtttctcgacagttcgtttccactctggctgcctttgcccccaacgacgacatcaaggccgagatgaaccgactcggctccgacaaggactacttccacgagaaaaccggtcctcactactacaacattgctcgattcctggcttctgtctccaagggtgagaagtggaccaagatccccttctccgccttcattgagggtctgaccaagctccagccccgatactactccatctcttcttcttctctcgtccagcccaagaagatctccatcaccgctgttgtcgagtcccagcagatccccggccgagatgaccccttccgaggtgttgccaccaactacctcttcgccctcaagcagaagcagaacggtgaccccaaccccgctcccttcggtcagtcttacgagctcaccggcccccgaaacaagtacgacggtatccacgtccccgtccacgtccgacactccaacttcaagctcccctccgaccccggcaagcccatcatcatgattggccccggtactggtgttgctcccttccgaggctttgtccaggagcgagccaagcaggctcgagatggtgtcgaggtcggtaagactctgctcttcttcggctgccgaaagtccaccgaggacttcatgtaccagaaggagtggcaggagtacaaagaggctctcggtgacaagttcgagatgatcaccgccttctcccgagagggctccaagaaggtctacgtccagcaccgactcaaggagcgatccaaggaagtctccgacctcctctcccagaaggcctacttctacgtctgcggtgacgccgcccacatggcccgagaggtcaacaccgttctggcccagatcattgccgagggccgaggtgtctccgaggccaagggcgaggagattgtcaagaacatgcgatctgccaaccagtaccaggtctgctccgactttgtcaccctccactgcaaggagactacttacgccaactccgagctccaggaagatgtctggtct

SEQ ID NO: 178 - DNA, 2076 bp, Arabidopsis thaliana
atgacctctgctctctacgcctccgatctcttcaagcagctcaagtccatcatgggtaccgactccctgtccgacgatgtcgttctggtcattgccaccacctctctggctctggtcgccggtttcgttgtcctcctctggaagaaaaccaccgctgaccgatccggcgagctcaagcccctcatgatccccaagtctctcatggccaaggacgaggacgacgatctcgatctcggttccggcaagacccgagtctccatcttctttggcacccagaccggtaccgccgagggtttcgccaaggctctctccgaggagatcaaggcccgatacgagaaggccgccgtcaaggtcatcgacctcgacgactacgctgctgacgacgaccagtacgaggagaagctcaagaaggagactctcgccttcttctgtgtcgccacctacggtgacggcgagcccaccgacaacgccgcccgattctacaagtggttcaccgaggagaacgagcgagacatcaagctccagcagctggcctacggtgttttcgccctcggcaaccgacagtacgagcacttcaacaagatcggtattgtcctcgacgaggagctctgcaagaagggtgccaagcgactcattgaggttggtctgggtgatgatgaccagtccattgaggacgacttcaacgcctggaaggagtctctgtggtccgagctcgacaagctgctcaaggacgaggacgacaagtccgttgccaccccctacaccgccgtcatccccgagtaccgagtcgtcacccacgacccccgattcaccacccagaagtccatggagtccaacgttgccaacggtaacaccaccattgacatccaccacccctgccgagtcgacgttgccgtccagaaggagctccacacccacgagtccgaccgatcttgtatccacctcgagtttgacatctcccgaaccggtatcacctacgagactggtgaccacgttggtgtctacgccgagaaccacgttgagattgtcgaggaagctggtaagctgctcggccactctctcgacctcgttttctccatccacgccgacaaagaggacggctctcccctcgagtccgctgttccccctcccttccccggcccctgcactctcggcaccggtctggcccgatacgctgacctcctcaaccctccccgaaagtccgctctggttgctctcgccgcctacgccaccgagccctccgaggccgagaagctcaagcacctgacctcccccgacggcaaggacgagtactcccagtggatcgttgcttcccagcgatctctgctcgaggtcatggccgccttcccctctgccaagccccctctgggtgttttctttgccgccattgctccccgactccagccccgatactactccatctcctcctctccccgactcgccccctctcgagtccacgtcacctctgctctcgtctacggtcccactcccactggccgaatccacaagggtgtctgctccacctggatgaagaacgccgtccccgctgagaagtcccacgagtgctccggtgctcccatcttcatccgagcctccaacttcaagctcccctccaacccctccacccccattgtcatggtcggccccggtactggtctggcccccttccgaggcttcctccaggagcgaatggctctcaaggaagatggtgaggagctcggctcttctctgctcttctttggctgccgaaaccgacagatggacttcatctacgaggacgagctcaacaactttgtcgaccagggtgtcatctccgagctcatcatggccttctcccgagagggtgcccagaaggagtacgtccagcacaagatgatggagaaggccgcccaggtctgggatctcatcaaggaagagggctacctctacgtctgtggtgacgccaagggcatggcccgagatgtccaccgaactctgcacaccattgtccaggagcaggaaggtgtctcttcctccgaggctgaggccattgtcaagaagctgcagaccgagggccgatacctgcgagatgtatgg

SEQ ID NO: 179 - DNA, 2133 bp, Arabidopsis thaliana
atgtcctcctcttcttcttcttccacctccatgattgatctcatggctgccatcatcaagggtgagcccgtcattgtctccgaccccgccaacgcctccgcctacgagtccgttgctgccgagctgtcctccatgctcatcgagaaccgacagtttgccatgatcgtcaccacctccattgctgttctcattggctgcattgtcatgctcgtctggcgacgatctggctccggtaactccaagcgagtcgagcccctcaagcccctggtcatcaagccccgagaagaggagatcgacgacggccgaaagaaggtcaccatcttctttggcacccagaccggtactgctgagggcttcgccaaggctctcggtgaggaagccaaggctcgatacgaaaagacccgattcaagattgtcgacctcgatgattacgctgccgatgacgacgagtacgaggagaagctcaagaaagaggacgttgccttcttcttcctcgccacctacggtgacggtgagcccaccgacaacgctgcccgattctacaagtggttcaccgagggtaacgaccgaggcgagtggctcaagaacctcaagtacggtgttttcggtctgggcaaccgacagtacgagcacttcaacaaggttgccaaggttgtcgacgacatcctcgtcgagcagggtgcccagcgactcgtccaggtcggcctcggtgatgatgaccagtgcatcgaggacgacttcactgcctggcgagaggctctgtggcccgagctcgacaccattctgcgagaggaaggtgacaccgccgttgccaccccctacaccgccgccgtcctcgagtaccgagtctccatccacgactccgaggatgccaagttcaacgacatcaacatggccaacggtaacggctacaccgtctttgacgcccagcacccctacaaggccaacgtcgccgtcaagcgagagctccacacccccgagtccgaccgatcttgtatccacctcgagtttgacattgctggttccggtctgacctacgagactggtgaccacgttggtgtcctctgtgacaacctgtccgagactgtcgacgaggctctgcgactcctcgacatgtcccccgacacttacttctctctgcacgccgagaaagaggacggtactcccatctcttcttctctgccccctcccttccctccctgcaacctgcgaaccgctctgacccgatacgcctgcctcctctcttctcccaagaagtctgctctcgttgctctggccgcccacgcctccgaccccaccgaggctgagcgactcaagcacctcgcctctcccgctggcaaggacgagtactccaagtgggttgtcgagtcccagcgatctctgctcgaggtcatggccgagttcccctccgccaagccccctctcggtgttttcttcgccggtgttgctccccgactccagccccgattctactccatctcctcttcccccaagatcgccgagactcgaatccacgttacctgtgctctggtctacgagaagatgcccaccggccgaatccacaagggtgtctgctccacctggatgaagaacgccgttccctacgagaagtccgagaactgttcctctgctcccatctttgtccgacagtccaacttcaagctcccctccgactccaaggtccccatcatcatgattggccccggtaccggcctcgcccccttccgaggcttcctgcaggagcgactcgccctcgtcgagtccggtgtcgagctcggcccctccgtcctcttctttggctgccgaaaccgacgaatggacttcatctacgaagaggagctccagcgattcgtcgagtccggtgctctcgccgagctctccgttgccttctcccgagagggtcccaccaaggagtacgtccagcacaagatgatggacaaggcctccgacatctggaacatgatctcccagggcgcctacctctacgtctgcggtgacgccaagggtatggcccgagatgtccaccgatctctgcacaccattgcccaggagcagggctccatggactccaccaaggccgagggtttcgtcaagaacctccagacctccggccgatacctccgagatgtctgg

SEQ ID NO: 180 - DNA, 1575 bp, Gibberella fujikuroi
atgtccaagtccaactccatgaactccacctcccacgagactctcttccagcagctcgttctcggcctcgaccgaatgcccctcatggacgtccactggctcatctacgttgcctttggtgcctggctctgctcctacgtcatccacgttctgtcctcttcctccactgtcaaggtccccgtcgtcggttaccgatccgttttcgagcccacctggctcctccgactgcgattcgtctgggagggtggttccatcattggccagggctacaacaagttcaaggactccatcttccaggtccgaaagctcggtaccgacattgtcatcatccctcccaactacattgacgaggtccgaaagctctcccaggacaagacccgatccgtcgagcccttcatcaacgactttgccggccagtacacccgaggtatggtctttctgcagtccgatctccagaaccgagtcatccagcagcgactcacccccaagcttgtctctctcaccaaggtcatgaaggaagagctcgactacgctctgaccaaggagatgcccgacatgaagaacgacgagtgggttgaggtcgacatctcttccatcatggtccgactcatctctcgaatctccgcccgagttttcctcggccccgagcactgccgaaaccaggagtggctcaccaccaccgccgagtactccgagtctctcttcatcaccggcttcatcctccgagttgtcccccacattctccgacccttcattgctcctctgctgccctcttaccgaaccctgctgcgaaacgtttcttccggccgacgagtcattggtgatatcatccgatcccagcagggtgacggtaacgaggacatcctctcttggatgcgagatgctgccactggtgaggagaagcagatcgacaacattgcccagcgaatgctcattctgtctctcgcctccatccacaccaccgccatgaccatgacccacgccatgtacgatctgtgtgcctgccccgagtacattgagcccctccgagatgaggtcaagtccgtcgttggtgcttctggctgggacaagaccgctctcaaccgattccacaagctcgactctttcctcaaggagtcccagcgattcaaccccgttttcctgctcaccttcaaccgaatctaccaccagtccatgaccctctccgatggtaccaacatcccctccggtacccgaattgctgtcccctctcacgccatgctccaggactccgcccacgtccccggtcccactcctcccactgagttcgacggtttccgatactccaagatccgatccgactccaactacgcccagaagtacctcttctccatgaccgactcttccaacatggcctttggctacggtaagtacgcctgccccggccgattctacgcctccaacgagatgaagctgactctggccattctgctcctccagtttgagttcaagctccccgacggtaagggccgaccccgaaacatcaccatcgactccgacatgatccccgacccccgagctcgactctgtgtccgaaagcgatctctgcgtgacgag

SEQ ID NO: 181 - DNA, 1419 bp, Stevia rebaudiana
atggccacctccgactccattgtcgacgaccgaaagcagctgcacgttgccaccttcccctggctcgcctttggccacattctgccctacctccagctctccaagctcattgctgagaagggccacaaggtttctttcctgtccaccacccgaaacatccagcgactctcctcccacatctctcctctcatcaacgttgtccagctcaccctcccccgagtccaggagctccccgaggatgccgaggccaccactgatgtccaccccgaggacatcccctacctcaagaaggcctccgacggtctgcagcccgaggtcacccgattcctcgagcagcactctcccgactggatcatctacgactacacccactactggctcccctccattgctgcttctctcggtatctctcgagcccacttctccgtcaccaccccctgggccattgcttacatgggcccctctgctgacgccatgatcaacggttccgacggccgaaccaccgtcgaggatctcaccacccctcccaagtggttccccttccccaccaaggtctgctggcgaaagcacgatctcgcccgactcgtcccctacaaggcccccggtatctccgacggttaccgaatgggtctggttctcaagggctccgactgtctgctctccaagtgctaccacgagtttggtacccagtggctccccctgctcgagactctgcaccaggtccccgttgtccccgtcggtctgctccctcccgagatccccggtgacgagaaggacgagacttgggtttccatcaagaagtggctcgacggcaagcagaagggctccgtcgtctacgttgctctcggctccgaggttcttgtctcccagactgaggtcgtcgagctcgccctcggtctggagctctccggtctgcccttcgtctgggcctaccgaaagcccaagggtcccgccaagtccgactccgtcgagctccccgacggtttcgtcgagcgaactcgagatcgaggtctggtctggacctcttgggctccccagctccgaatcctctcccacgagtccgtctgcggtttcctgacccactgtggttccggctccattgtcgagggcctcatgttcggccaccccctcatcatgctgcccatcttcggtgaccagcccctcaacgcccgactcctcgaggacaagcaggtcggtatcgagatcccccgaaacgaagaggacggctgcctcaccaaggagtctgttgcccgatctctgcgatctgttgttgtcgagaaagagggtgagatctacaaggccaacgcccgagagctctccaagatctacaacgacaccaaggtcgagaaggagtacgtttcccagtttgtcgactacctcgagaagaacgcccgagctgtcgccattgaccacgagagt

SEQ ID NO: 182 - DNA, 2552 bp, Artificial sequence
  tCPS-cwpT
cccactagttataaagtcacaagtatctcagtatacccgtctaaccacacatttatcaccatgtgcaaggctgtttccaaggagtactccgatctgctccagaaggacgaggcctctttcaccaagtgggacgacgacaaggtcaaggaccacctcgacaccaacaagaacctctaccccaacgacgagatcaaggagtttgtcgagtccgtcaaggccatgttcggctccatgaacgacggcgagattaatgtctctgcttacgacaccgcctgggttgctctggtccaggatgtcgacggttccggctctcctcagttcccttcctctctcgagtggatcgccaacaaccagctgtccgacggttcttggggtgaccacctgctcttctctgctcacgaccgaatcatcaacaccctggcctgtgtcattgctctgacctcttggaacgtccacccctccaagtgcgagaagggtctgaacttcctccgagagaacatctgcaagctcgaggacgagaacgccgagcacatgcccattggcttcgaggtcaccttcccctctctgattgacattgccaagaagctcaacattgaggtccccgaggacacccccgctctcaaggagatctacgctcgacgagacatcaagctcaccaagatccccatggaggttctccacaaggtccccaccactctcctccactctctcgagggtatgcccgatctcgagtgggagaagctgctcaagctgcagtgcaaggacggctctttcctcttctccccctcttccactgccttcgccctcatgcagaccaaggacgagaagtgtctccagtacctcaccaacattgtcaccaagttcaacggtggtgtccccaacgtctaccccgttgacctctttgagcacatctgggttgttgaccgactccagcgactcggtatcgcccgatacttcaagtccgagatcaaggactgtgtcgagtacatcaacaagtactggaccaagaacggtatctgctgggcccgaaacacccacgtccaggacattgacgacaccgccatgggcttccgagttctgcgagcccacggctacgatgtcacccccgatgtctttcgacagtttgagaaggacggcaagtttgtctgtttcgccggtcagtccacccaggccgtcaccggtatgttcaacgtctaccgagcttctcagatgctcttccccggtgagcgaatcctcgaggacgccaagaagttctcctacaactacctcaaggagaagcagtccaccaacgagctgctcgacaagtggatcattgccaaggatctgcccggtgaggttggctacgccctcgacatcccctggtacgcctctctgccccgactggagactcgatactacctcgagcagtacggtggtgaggacgatgtctggatcggtaagaccctgtaccgaatgggctacgtttccaacaacacctacctcgagatggccaagctcgactacaacaactacgttgccgtcctccagctcgagtggtacaccatccagcagtggtacgtcgacattggtatcgagaagttcgagtccgacaacatcaagtccgtccttgtctcctactacctcgctgctgcctccatcttcgagcccgagcgatccaaggagcgaattgcctgggccaagaccaccatcctcgtcgacaagatcacctccatcttcgactcctcccagtcctccaaggaagatatcaccgccttcattgacaagttccgaaacaagtcctcctccaagaagcactccatcaacggcgagccctggcacgaggtcatggttgctctcaagaaaactctccacggctttgccctcgacgctctgatgacccactctcaggacatccacccccagctccaccaggcctgggagatgtggctcaccaagctccaggacggtgttgatgtcactgctgagctcatggtccagatgatcaacatgaccgccggccgatgggtttccaaggagctcctcacccacccccagtaccagcgactctccactgtcaccaactctgtctgccacgacatcaccaagctccacaacttcaaggagaactccaccaccgtcgactccaaggtccaggagctggtccagctcgttttctccgacacccccgatgatctcgaccaggacatgaagcagaccttcctgactgtcatgaaaactttctactacaaggcctggtgcgaccccaacaccatcaacgaccacatctccaaggtctttgagattgtgatttaagttttttgatcaatgatccaatggctttcacatacccccccacgcctataattaaaacacagagaaatataatctaacttaataaatattacggagaatctttcgagtgttcagcagaaatatagccattgtaacaaaagccggctatcgaccgctttatcgaagaatatttcccgccccccagtggccaaacgatatcgaaacaaaagagctgaaatcatatccttcagtagtagtatagtcctgttatcacagcatca

SEQ ID NO: 183 - DNA, 2394 bp, Artificial sequence
  tKS
agatatacaagcaatgtcactctccttcgtactcgtacatacaacacaactacattcaaaatgacctcccacggcggccagaccaaccccaccaacctcatcattgacaccaccaaggagcgaatccagaagcagttcaagaacgtcgagatctccgtttcctcctacgacaccgcctgggtcgccatggtcccctctcccaactcccccaagtctccctgcttccccgagtgtctcaactggctcatcaacaaccagctcaacgacggctcttggggtctggtcaaccacacccacaaccacaaccaccccctcctcaaggactctctctcttccactctcgcctgcattgttgctctcaagcgatggaacgttggcgaggaccagatcaacaagggtctgtctttcattgagtccaacctcgcctccgccaccgagaagtcccagccctcccccattggctttgatatcatcttccccggtctgctcgagtacgccaagaacctcgatatcaacctgctctccaagcagaccgacttctctctcatgctgcacaagcgagagctcgagcagaagcgatgccactccaacgagatggacggctacctggcctacatttccgagggtctgggtaacctctacgactggaacatggtcaagaagtaccagatgaagaacggttccgttttcaactccccctctgccaccgctgctgccttcatcaaccaccagaaccccggctgtctcaactacctcaactctctgctcgacaagtttggtaacgccgtccccactgtctacccccacgatctcttcatccgactctccatggtcgacaccattgagcgactcggtatttcccaccacttccgagtcgagatcaagaacgttctcgatgagacttaccgatgctgggttgagcgagatgagcagatcttcatggacgttgtcacctgtgctctggccttccgactcctccgaatcaacggttacgaggtttcccccgaccccctcgccgagatcaccaacgagctggctctcaaggacgagtacgccgccctcgagacttaccacgcttctcacattctgtaccaagaggatctgtcctccggcaagcagattctcaagtccgccgacttcctcaaggagatcatctccactgactccaaccgactctccaagctcatccacaaggaagtcgagaacgctctcaagttccccatcaacaccggtctggagcgaatcaacacccgacgaaacatccagctctacaacgtcgacaacacccgaattctcaagaccacctaccactcttccaacatctccaacaccgactacctgcgactcgccgtcgaggacttctacacctgccagtccatctaccgagaggagctcaagggtctggagcgatgggttgtcgagaacaagctcgaccagctcaagtttgcccgacaaaagactgcctactgctacttctccgttgctgccaccctctcttctcccgagctctccgacgcccgaatctcttgggccaagaacggtatcctgaccactgttgtcgacgacttctttgacattggtggcaccattgacgagctgaccaacctcatccagtgcgtcgagaagtggaacgtcgacgttgacaaggactgttgttccgagcacgtccgaatcctcttcctggctctcaaggacgccatctgctggatcggtgacgaggccttcaagtggcaggctcgagatgtcacttcccacgtcatccagacctggctcgagctcatgaactccatgctgcgagaggccatctggacccgagatgcctacgtccccaccctcaacgagtacatggagaacgcctacgtcagctttgctctcggtcccattgtcaagcccgccatctactttgtcggtcccaagctgtccgaggagattgtcgagtcctccgagtaccacaacctcttcaagctcatgtccacccagggccgactcctcaacgatatccactccttcaagcgagagttcaaggaaggtaagctcaacgccgttgctctgcacctgtccaacggtgagtccggcaaggtcgaggaagaggtcgtcgaggagatgatgatgatgatcaagaacaagcgaaaggagctcatgaagctcatcttcgaggagaacggctccattgtcccccgagcctgcaaggacgccttctggaacatgtgccacgtcctcaacttcttctacgccaacgacgacggtttcaccggcaacaccattctcgacaccgtcaaggacatcatctacaaccctctggttctggtcaacgagaacgaggagcagaggtaactatccgaagatcaagagcgaagcaagttgtaagtccaggacatgtttcccgcccacgcg

SEQ ID NO: 184 - DNA, 2979 bp, Artificial sequence
  CPSKS
cccactagttataaagtcacaagtatctcagtatacccgtctaaccacacatttatcaccatgcccggcaagattgagaacggtacccccaaggacctcaagaccggcaacgacttcgtttccgctgccaagtctctgctcgaccgagccttcaagtcccaccactcctactacggtctgtgctccacttcctgccaggtctacgacaccgcctgggttgccatgatccccaagacccgagacaacgtcaagcagtggctcttccccgagtgtttccactacctgctcaagacccaggctgctgacggctcttggggctctctgcccaccacccagaccgccggtatcctcgacactgcctccgccgttctggctctgctctgccacgcccaggagcctctgcagatcctcgatgtctcccccgatgagatgggtctgcgaatcgagcacggtgtcacttctctcaagcgacagctcgccgtctggaacgacgttgaggacaccaaccacattggtgtcgagttcatcatccccgctctgctctccatgctcgagaaggagctcgatgtcccctccttcgagttcccttgccgatccattctggagcgaatgcacggcgagaagctcggtcactttgatctcgagcaggtctacggcaagccctcttctctgctgcactctctcgaggccttcctcggcaagctcgatttcgaccgactctcccaccacctctaccacggctccatgatggcctccccctcttccaccgccgcctacctcattggtgccaccaagtgggacgacgaggccgaggactacctccgacacgtcatgcgaaacggtgccggccacggtaacggtggtatctctggtaccttccccaccacccactttgagtgctcctggatcattgccactctcctcaaggtcggtttcactctcaagcagattgacggtgacggtctgcgaggcctctccaccattctcctcgaggctctgcgtgacgagaacggtgtcattggcttcgctccccgaaccgccgacgttgatgacactgccaaggctctgctggctctgtctctggtcaaccagcccgtttcccccgacatcatgatcaaggttttcgagggtaaggaccacttcaccacctttggctccgagcgagatccctctctgacctccaacctccacgttctcctctctctgctcaagcagtccaacctgtctcagtaccacccccagatcctcaagaccactctcttcacctgtcgatggtggtggggctccgaccactgtgtcaaggacaagtggaacctctcccacctctaccccaccatgctcctcgtcgaggccttcaccgaggttctgcacctcatcgacggtggtgagctctcctctctgtttgacgagtctttcaagtgcaagatcggtctgtccatcttccaggccgttctccgaatcatcctcacccaggacaacgacggctcttggcgaggctaccgagagcagacctgttacgccattctcgccctcgtccaggcccgacacgtctgtttcttcacccacatggtcgaccgactccagtcctgtgtcgaccgaggtttctcttggctcaagtcttgctccttccactctcaggacctcacctggacctccaagaccgcttacgaggttggtttcgttgccgaggcctacaagctcgctgctctccagtccgcctctctcgaggtccccgctgccaccatcggccactccgtcacctctgctgtcccctcctccgatctcgagaagtacatgcgactcgtccgaaagaccgctctgttctctcccctcgatgagtggggtctgatggcctccatcatcgagtcctccttctttgtccccctcctccaggcccagcgagttgagatctacccccgagacaacatcaaggtcgacgaggacaagtacctctccatcatccccttcacctgggttggctgcaacaaccgatctcgaacctttgcctccaaccgatggctctacgacatgatgtacctgtctctgctcggctaccagaccgacgagtacatggaggccgttgccggccccgtctttggtgatgtctctctgctgcaccagaccatcgacaaggtcattgacaacaccatgggtaacctggcccgagccaacggtaccgtccactccggcaacggtcaccagcacgagtcccccaacattggccaggtcgaggacaccctcactcgatttaccaactccgtcctcaaccacaaggacgtcctcaactcctcctcctccgaccaggacaccctccgacgagagttccgaaccttcatgcacgcccacatcacccagatcgaggacaactcccgattctccaagcaggcttcttccgacgccttctcctcccccgagcagtcctacttccagtgggtcaactccactggtggttcccacgttgcctgcgcctactctttcgccttctccaactgcctcatgtccgccaacctcctccagggtaaggacgccttcccttccggtacccagaagtacctcatctcctccgtcatgcgacacgccaccaacatgtgccgaatgtacaacgatttcggttccatcgcccgagacaacgccgagcgaaacgtcaactccatccactttcccgagttcactctctgtaacggtacctcccagaacctcgacgagcgaaaggagcgactcctcaagattgctacttacgagcagggctacctcgaccgagctctcgaggctctggagcgacagtcccgagatgatgctggtgaccgagccggctccaaggacatgcgaaagctcaagattgtcaagctcttctgtgacgtcaccgacctctacgaccagctctacgtcatcaaggacctctcctcctccatgaaataactatccgaagatcaagagcgaagcaagttgtaagtccaggacatgtttcccgcccacgcg

SEQ ID NO: 185 - DNA, 1698 bp, Artificial sequence
  KAH4
ttgaatcttttttcttcttctcttctctatattcattcttgaattaaacacacatcaacaatggagtctctggttgtccacaccgtcaacgccatctggtgcattgtcattgtcggtatcttctccgtcggctaccacgtctacggccgagctgttgtcgagcagtggcgaatgcgacgatctctcaagctccagggtgtcaagggtcctcctccctccatcttcaacggtaacgtttccgagatgcagcgaatccagtccgaggccaagcactgctccggtgacaacatcatctcccacgactactcttcttctctgttcccccactttgaccactggcgaaagcagtacggccgaatctacacctactccactggcctcaagcagcacctctacatcaaccaccccgagatggtcaaggagctctcccagaccaacaccctcaacctcggccgaatcacccacatcaccaagcgactcaaccccattctcggtaacggtatcatcacctccaacggcccccactgggcccaccagcgacgaatcattgcctacgagttcacccacgacaagatcaagggtatggtcggtctgatggtcgagtccgccatgcccatgctcaacaagtgggaggagatggtcaagcgaggtggtgagatgggctgtgacatccgagtcgacgaggacctcaaggatgtctccgctgacgtcattgccaaggcctgtttcggctcttccttctccaagggcaaggccatcttctccatgatccgagatctgctcaccgccatcaccaagcgatccgtcctcttccgattcaacggtttcaccgacatggttttcggctccaagaagcacggtgacgttgacattgacgctctcgagatggagctcgagtcctccatctgggagactgtcaaggagcgagagattgagtgcaaggacacccacaagaaggacctcatgcagctcattctcgagggtgccatgcgatcttgtgacggtaacctgtgggacaagtctgcttaccgacgattcgttgtcgacaactgcaagtccatctactttgccggccacgactccaccgccgtttccgtttcttggtgcctcatgctgctcgctctcaacccctcttggcaggtcaagatccgagatgagattctgtcctcctgcaagaacggtatccccgacgccgagtccatccccaacctcaagaccgtcaccatggtcatccaggagactatgcgactctaccctcccgctcccattgtcggccgagaggcctccaaggacattcgactcggtgatctggttgtccccaagggtgtctgtatctggaccctcatccccgctctgcaccgagatcccgagatctggggtcccgacgccaacgacttcaagcccgagcgattctccgagggtatctccaaggcctgcaagtacccccagtcctacatcccctttggcctcggcccccgaacctgtgtcggcaagaactttggtatgatggaggtcaaggtcctcgtttctctgattgtctccaagttctccttcactctgtctcccacctaccagcactctccctcccacaagctgctcgtcgagccccagcacggtgttgtcatccgagttgtataaacttcgagctaatccagtagcttacgttacccaggggcaggtcaactggctagccacgag

SEQ ID NO: 186 - DNA, 1698 bp, Artificial sequence
  KOgib
cacacccgaaatcgttaagcatttccttctgagtataagaatcattcgctagccacaaaaatgtccaagtccaactccatgaactccacctcccacgagactctcttccagcagctcgttctcggcctcgaccgaatgcccctcatggacgtccactggctcatctacgttgcctttggtgcctggctctgctcctacgtcatccacgttctgtcctcttcctccactgtcaaggtccccgtcgtcggttaccgatccgttttcgagcccacctggctcctccgactgcgattcgtctgggagggtggttccatcattggccagggctacaacaagttcaaggactccatcttccaggtccgaaagctcggtaccgacattgtcatcatccctcccaactacattgacgaggtccgaaagctctcccaggacaagacccgatccgtcgagcccttcatcaacgactttgccggccagtacacccgaggtatggtctttctgcagtccgatctccagaaccgagtcatccagcagcgactcacccccaagcttgtctctctcaccaaggtcatgaaggaagagctcgactacgctctgaccaaggagatgcccgacatgaagaacgacgagtgggttgaggtcgacatctcttccatcatggtccgactcatctctcgaatctccgcccgagttttcctcggccccgagcactgccgaaaccaggagtggctcaccaccaccgccgagtactccgagtctctcttcatcaccggcttcatcctccgagttgtcccccacattctccgacccttcattgctcctctgctgccctcttaccgaaccctgctgcgaaacgtttcttccggccgacgagtcattggtgatatcatccgatcccagcagggtgacggtaacgaggacatcctctcttggatgcgagatgctgccactggtgaggagaagcagatcgacaacattgcccagcgaatgctcattctgtctctcgcctccatccacaccaccgccatgaccatgacccacgccatgtacgatctgtgtgcctgccccgagtacattgagcccctccgagatgaggtcaagtccgtcgttggtgcttctggctgggacaagaccgctctcaaccgattccacaagctcgactctttcctcaaggagtcccagcgattcaaccccgttttcctgctcaccttcaaccgaatctaccaccagtccatgaccctctccgatggtaccaacatcccctccggtacccgaattgctgtcccctctcacgccatgctccaggactccgcccacgtccccggtcccactcctcccactgagttcgacggtttccgatactccaagatccgatccgactccaactacgcccagaagtacctcttctccatgaccgactcttccaacatggcctttggctacggtaagtacgcctgccccggccgattctacgcctccaacgagatgaagctgactctggccattctgctcctccagtttgagttcaagctccccgacggtaagggccgaccccgaaacatcaccatcgactccgacatgatccccgacccccgagctcgactctgtgtccgaaagcgatctctgcgtgacgagtaagctatttacagcatgtgtaatgaggaatataacgttgattgaattgtttgtgaaaaatgt

SEQ ID NO: 187 - DNA, 2262 bp, Artificial sequence
  CPR1
cgtccatatatatctatgctgcgtcgtccttttcgtgacatcaccaaaacacatacaaaaatggctgagctcgacactctcgacattgttgttctcggtgtcatcttcctcggtaccgttgcctacttcaccaagggtaagctgtggggtgtcaccaaggacccctacgccaacggctttgctgctggtggtgcctccaagcccggccgaacccgaaacattgttgaggccatggaggagtccggcaagaactgtgttgttttctacggctcccagaccggcaccgccgaggactacgcctctcgactggccaaggaaggcaagtctcgattcggtctgaacaccatgatcgctgatctcgaggactacgactttgacaacctggacaccgtcccctccgacaacatcgtcatgtttgtcctggccacctacggtgagggtgagcccaccgacaacgccgtcgacttctacgagttcatcaccggtgaggacgcttctttcaacgagggtaacgaccctcctctcggcaacctcaactacgttgccttcggtctgggcaacaacacctacgagcactacaactccatggtccgaaacgtcaacaaggctctcgagaagctcggcgcccaccgaatcggtgaggctggtgagggtgacgacggtgccggtaccatggaggaagatttcctggcctggaaggaccccatgtgggaggctctcgccaagaagatgggcctcgaggagcgagaggccgtctacgagcccatctttgccatcaacgagcgagatgatctcacccccgaggccaacgaggtctacctcggtgagcccaacaagctccacctcgagggtaccgccaagggccccttcaactcccacaacccctacattgcccccattgctgagtcctacgagctgttctccgccaaggaccgaaactgtctgcacatggagattgacatctccggctccaacctcaagtacgagactggtgaccacatcgccatctggcccaccaaccccggtgaagaggtcaacaagttcctcgacatcctcgatctctccggcaagcagcactctgttgtcaccgtcaaggctctcgagcccaccgccaaggtccccttccccaaccccaccacctacgacgccatcctgcgataccacctcgagatctgtgcccccgtttctcgacagttcgtttccactctggctgcctttgcccccaacgacgacatcaaggccgagatgaaccgactcggctccgacaaggactacttccacgagaaaaccggtcctcactactacaacattgctcgattcctggcttctgtctccaagggtgagaagtggaccaagatccccttctccgccttcattgagggtctgaccaagctccagccccgatactactccatctcttcttcttctctcgtccagcccaagaagatctccatcaccgctgttgtcgagtcccagcagatccccggccgagatgaccccttccgaggtgttgccaccaactacctcttcgccctcaagcagaagcagaacggtgaccccaaccccgctcccttcggtcagtcttacgagctcaccggcccccgaaacaagtacgacggtatccacgtccccgtccacgtccgacactccaacttcaagctcccctccgaccccggcaagcccatcatcatgattggccccggtactggtgttgctcccttccgaggctttgtccaggagcgagccaagcaggctcgagatggtgtcgaggtcggtaagactctgctcttcttcggctgccgaaagtccaccgaggacttcatgtaccagaaggagtggcaggagtacaaagaggctctcggtgacaagttcgagatgatcaccgccttctcccgagagggctccaagaaggtctacgtccagcaccgactcaaggagcgatccaaggaagtctccgacctcctctcccagaaggcctacttctacgtctgcggtgacgccgcccacatggcccgagaggtcaacaccgttctggcccagatcattgccgagggccgaggtgtctccgaggccaagggcgaggagattgtcaagaacatgcgatctgccaaccagtaccaggtctgctccgactttgtcaccctccactgcaaggagactacttacgccaactccgagctccaggaagatgtctggtcttaaaattaacagatagtttgccggtgataattctcttaacctcccacactcctttgacataac

SEQ ID NO: 188 - DNA, 2256 bp, Artificial sequence
  CPR3
cgtccatatatatctatgctgcgtcgtccttttcgtgacatcaccaaaacacatacaaaaatgtcctcctcttcttcttcttccacctccatgattgatctcatggctgccatcatcaagggtgagcccgtcattgtctccgaccccgccaacgcctccgcctacgagtccgttgctgccgagctgtcctccatgctcatcgagaaccgacagtttgccatgatcgtcaccacctccattgctgttctcattggctgcattgtcatgctcgtctggcgacgatctggctccggtaactccaagcgagtcgagcccctcaagcccctggtcatcaagccccgagaagaggagatcgacgacggccgaaagaaggtcaccatcttctttggcacccagaccggtactgctgagggcttcgccaaggctctcggtgaggaagccaaggctcgatacgaaaagacccgattcaagattgtcgacctcgatgattacgctgccgatgacgacgagtacgaggagaagctcaagaaagaggacgttgccttcttcttcctcgccacctacggtgacggtgagcccaccgacaacgctgcccgattctacaagtggttcaccgagggtaacgaccgaggcgagtggctcaagaacctcaagtacggtgttttcggtctgggcaaccgacagtacgagcacttcaacaaggttgccaaggttgtcgacgacatcctcgtcgagcagggtgcccagcgactcgtccaggtcggcctcggtgatgatgaccagtgcatcgaggacgacttcactgcctggcgagaggctctgtggcccgagctcgacaccattctgcgagaggaaggtgacaccgccgttgccaccccctacaccgccgccgtcctcgagtaccgagtctccatccacgactccgaggatgccaagttcaacgacatcaacatggccaacggtaacggctacaccgtctttgacgcccagcacccctacaaggccaacgtcgccgtcaagcgagagctccacacccccgagtccgaccgatcttgtatccacctcgagtttgacattgctggttccggtctgacctacgagactggtgaccacgttggtgtcctctgtgacaacctgtccgagactgtcgacgaggctctgcgactcctcgacatgtcccccgacacttacttctctctgcacgccgagaaagaggacggtactcccatctcttcttctctgccccctcccttccctccctgcaacctgcgaaccgctctgacccgatacgcctgcctcctctcttctcccaagaagtctgctctcgttgctctggccgcccacgcctccgaccccaccgaggctgagcgactcaagcacctcgcctctcccgctggcaaggacgagtactccaagtgggttgtcgagtcccagcgatctctgctcgaggtcatggccgagttcccctccgccaagccccctctcggtgttttcttcgccggtgttgctccccgactccagccccgattctactccatctcctcttcccccaagatcgccgagactcgaatccacgttacctgtgctctggtctacgagaagatgcccaccggccgaatccacaagggtgtctgctccacctggatgaagaacgccgttccctacgagaagtccgagaactgttcctctgctcccatctttgtccgacagtccaacttcaagctcccctccgactccaaggtccccatcatcatgattggccccggtaccggcctcgcccccttccgaggcttcctgcaggagcgactcgccctcgtcgagtccggtgtcgagctcggcccctccgtcctcttctttggctgccgaaaccgacgaatggacttcatctacgaagaggagctccagcgattcgtcgagtccggtgctctcgccgagctctccgttgccttctcccgagagggtcccaccaaggagtacgtccagcacaagatgatggacaaggcctccgacatctggaacatgatctcccagggcgcctacctctacgtctgcggtgacgccaagggtatggcccgagatgtccaccgatctctgcacaccattgcccaggagcagggctccatggactccaccaaggccgagggtttcgtcaagaacctccagacctccggccgatacctccgagatgtctggtaaaattaacagatagtttgccggtgataattctcttaacctcccacactcctttgacataac

SEQ ID NO: 189 - DNA, 1566 bp, Artificial sequence
  UGT1
cccactagttataaagtcacaagtatctcagtatacccgtctaaccacacatttatcaccatggacgccatggccaccaccgagaagaagccccacgtcatcttcatccccttccccgcccagtcccacatcaaggccatgctcaagctcgcccagctcctccaccacaagggcctccagatcacctttgtcaacaccgacttcatccacaaccagttcctcgagtcctccggcccccactgtctggacggtgctcccggtttccgatttgagactatccccgatggtgtctcccactcccccgaggcctccatccccatccgagagtctctgctccgatccattgagactaacttcctcgaccgattcattgatctcgtcaccaagctccccgatcctcccacctgtatcatctccgacggtttcctgtccgttttcaccattgatgctgccaagaagctcggtatccccgtcatgatgtactggactctggctgcctgtggtttcatgggtttctaccacatccactctctgatcgagaagggctttgctcctctcaaggacgcctcctacctcaccaacggttacctcgacaccgtcattgactgggtccccggtatggagggtatccgactcaaggacttccccctcgactggtccaccgacctcaacgacaaggttctcatgttcaccaccgaggctccccagcgatcccacaaggtttcccaccacatcttccacaccttcgacgagctcgagccctccatcatcaagactctgtctctgcgatacaaccacatctacaccattggccccctccagctcctcctcgaccagatccccgaggagaagaagcagaccggtatcacctctctgcacggctactctctcgtcaaggaagagcccgagtgcttccagtggctccagtccaaggagcccaactccgttgtctacgtcaactttggctccaccaccgtcatgtctctcgaggacatgaccgagtttggctggggtctggccaactccaaccactacttcctgtggatcatccgatccaacctcgtcattggcgagaacgccgttctgcctcccgagctcgaggagcacatcaagaagcgaggcttcattgcctcttggtgctcccaggagaaggttctcaagcacccctccgtcggtggtttcctgacccactgcggctggggctccaccattgagtctctgtccgctggtgtccccatgatctgctggccctactcctgggaccagctcaccaactgccgatacatctgcaaggagtgggaggttggtctggagatgggtaccaaggtcaagcgagatgaggtcaagcgactcgtccaggagctcatgggcgagggtggtcacaagatgcgaaacaaggccaaggactggaaggagaaggcccgaattgccattgcccccaacggctcttcttctctcaacattgacaagatggtcaaggagatcactgttctcgctcgaaactaactatccgaagatcaagagcgaagcaagttgtaagtccaggacatgtttcccgcccacgcg

SEQ ID NO: 190 - DNA, 1503 bp, Artificial sequence
  UGT3
ttgaatcttttttcttcttctcttctctatattcattcttgaattaaacacacatcaacaatggccgagcagcagaagatcaagaagtctccccacgttctgctcatccccttccctctgcagggccacatcaaccccttcatccagttcggcaagcgactcatctccaagggtgtcaagaccactctggtcaccaccatccacaccctcaactccactctcaaccactccaacaccaccaccacctccatcgagatccaggccatctccgacggctgtgacgagggtggtttcatgtctgctggtgagtcttacctcgagactttcaagcaggtcggttccaagtctctggctgacctcatcaagaagctccagtccgagggtaccaccattgacgccatcatctacgactccatgaccgagtgggttctcgatgtcgccatcgagtttggtattgacggtggctccttcttcacccaggcctgtgtcgtcaactctctctactaccacgtccacaagggtctgatctctctgcccctcggcgagactgtctccgtccccggtttccccgttctgcagcgatgggagactcctctcattctccagaaccacgagcagatccagtccccctggtcccagatgctcttcggccagttcgccaacattgaccaggcccgatgggttttcaccaactccttctacaagctcgaggaagaggtcattgagtggacccgaaagatctggaacctcaaggtcattggccccaccctcccctccatgtacctcgacaagcgactcgatgacgacaaggacaacggtttcaacctctacaaggccaaccaccacgagtgcatgaactggctcgacgacaagcccaaggagtccgttgtctacgttgcctttggctctctggtcaagcacggccccgagcaggttgaggagatcacccgagctctgattgactccgatgtcaacttcctgtgggtcatcaagcacaaggaagagggtaagctccccgagaacctgtccgaggtcatcaagaccggcaagggcctcattgttgcctggtgcaagcagctcgacgttctcgcccacgagtccgtcggctgctttgtcacccactgcggtttcaactccaccctcgaggctatctctctcggtgtccccgttgttgccatgccccagttctccgaccagaccaccaacgccaagctcctcgatgagattctcggtgtcggtgtccgagtcaaggctgacgagaacggtattgtccgacgaggtaacctggcttcttgtatcaagatgatcatggaggaagagcgaggtgtcatcatccgaaagaacgccgtcaagtggaaggatctggccaaggttgctgtccacgagggtggctcttccgacaacgacattgtcgagtttgtctccgagctcatcaaggcctaaacttcgagctaatccagtagcttacgttacccaggggcaggtcaactggctagccacgag

SEQ ID NO: 191 - DNA, 1497 bp, Artificial sequence
  UGT4
cacacccgaaatcgttaagcatttccttctgagtataagaatcattcgctagccacaaaaatggagaacaagaccgagactaccgtccgacgacgacgacgaatcattctcttccccgtccccttccagggccacatcaaccccattctgcagctcgccaacgttctgtactccaagggcttctccatcaccatcttccacaccaacttcaacaagcccaagacctccaactacccccacttcactttccgattcatcctcgacaacgacccccaggacgagcgaatctccaacctgcccacccacggtcctctggctggtatgcgaatccccatcatcaacgagcacggtgctgacgagctccgacgagagctcgagctgctcatgctcgcctccgaagaggacgaggaagtctcctgtctgatcaccgatgctctgtggtactttgcccagtccgtcgccgactctctcaacctgcgacgactcgttctcatgacctcctctctgttcaacttccacgcccacgtttctctgccccagtttgacgagctcggttacctcgaccccgatgacaagacccgactcgaggagcaggcttccggtttccccatgctcaaggtcaaggacatcaagtccgcctactccaactggcagattctcaaggagattctcggcaagatgatcaagcagaccaaggcctcctccggtgtcatctggaactccttcaaggagctcgaggagtccgagctcgagactgtcatccgagagatccccgctccctctttcctcatccccctgcccaagcacctcaccgcttcctcctcttctctgctcgaccacgaccgaaccgtctttcagtggctcgaccagcagcccccttcctccgtcctctacgtttccttcggctccacctccgaggtcgacgagaaggacttcctcgagattgctcgaggcctcgttgactccaagcagtccttcctgtgggttgtccgacccggctttgtcaagggctccacctgggttgagcccctgcccgatggtttcctcggtgagcgaggccgaattgtcaagtgggtcccccagcaggaagttctggcccacggtgccattggtgccttctggacccactccggctggaactccactctcgagtccgtctgcgagggtgtccccatgatcttctccgactttggcctcgaccagcccctcaacgcccgatacatgtccgatgttctcaaggtcggtgtctacctcgagaacggctgggagcgaggtgagattgccaacgccatccgacgagtcatggtcgacgaggaaggtgagtacatccgacagaacgcccgagtcctcaagcagaaggccgatgtctctctcatgaagggtggttcttcttacgagtctctcgagtctctcgtttcctacatctcttctttgtaagctatttacagcatgtgtaatgaggaatataacgttgattgaattgtttgtgaaaaatgt

SEQ ID NO: 192 - DNA, 1542 bp, Artificial sequence
  UGT9
cgtccatatatatctatgctgcgtcgtccttttcgtgacatcaccaaaacacatacaaaaatggccacctccgactccattgtcgacgaccgaaagcagctgcacgttgccaccttcccctggctcgcctttggccacattctgccctacctccagctctccaagctcattgctgagaagggccacaaggtttctttcctgtccaccacccgaaacatccagcgactctcctcccacatctctcctctcatcaacgttgtccagctcaccctcccccgagtccaggagctccccgaggatgccgaggccaccactgatgtccaccccgaggacatcccctacctcaagaaggcctccgacggtctgcagcccgaggtcacccgattcctcgagcagcactctcccgactggatcatctacgactacacccactactggctcccctccattgctgcttctctcggtatctctcgagcccacttctccgtcaccaccccctgggccattgcttacatgggcccctctgctgacgccatgatcaacggttccgacggccgaaccaccgtcgaggatctcaccacccctcccaagtggttccccttccccaccaaggtctgctggcgaaagcacgatctcgcccgactcgtcccctacaaggcccccggtatctccgacggttaccgaatgggtctggttctcaagggctccgactgtctgctctccaagtgctaccacgagtttggtacccagtggctccccctgctcgagactctgcaccaggtccccgttgtccccgtcggtctgctccctcccgagatccccggtgacgagaaggacgagacttgggtttccatcaagaagtggctcgacggcaagcagaagggctccgtcgtctacgttgctctcggctccgaggttcttgtctcccagactgaggtcgtcgagctcgccctcggtctggagctctccggtctgcccttcgtctgggcctaccgaaagcccaagggtcccgccaagtccgactccgtcgagctccccgacggtttcgtcgagcgaactcgagatcgaggtctggtctggacctcttgggctccccagctccgaatcctctcccacgagtccgtctgcggtttcctgacccactgtggttccggctccattgtcgagggcctcatgttcggccaccccctcatcatgctgcccatcttcggtgaccagcccctcaacgcccgactcctcgaggacaagcaggtcggtatcgagatcccccgaaacgaagaggacggctgcctcaccaaggagtctgttgcccgatctctgcgatctgttgttgtcgagaaagagggtgagatctacaaggccaacgcccgagagctctccaagatctacaacgacaccaaggtcgagaaggagtacgtttcccagtttgtcgactacctcgagaagaacgcccgagctgtcgccattgaccacgagagttaaaattaacagatagtttgccggtgataattctcttaacctcccacactcctttgacataac

SEQ ID NO: 193 - DNA, 880 bp, Artificial sequence
  pTPI
aaacaaaagagctgaaatcatatccttcagtagtagtatagtcctgttatcacagcatcaattacccccgtccaagtaagttgattgggatttttgtttacagatacagtaatatacttgactatttctttacaggtgactcagaaagtgcatgttggaaatgagccacagaccaagacaagatatgacaaaattgcactattcgatgcagaattcgacggtgtttccattggtgttatgacattcatctgcattcatacaaaaaagtcttggtagtggtacttttgcgttattacctccgatatctacgcaccccccaacccccctgctacagtaaagagtgtgagtctactgtacatgcttactaaaccacctactgtacagcgaaacccctcagcaaaatcacacaatcagctcattacaacacacccaatgacctcaccacaaattctatacgccttttgacgccattattacagtagcttgcaacgccgttgtcttaggttccatttttagtgctctattacctcacttaacccgtataggcagatcaggccatggcactaagtgtagagctagaggttgatatcgccacgagtgctccatcagggctagggtggggttagaaatacagtccgtgcgcactcaaaaggcgtccgggttagggcatccgataatatcgcctggactcggcgccatattctcgacttctgggcgcgttgtattcatctcctccgcttcccaacacttccacccgtttctccatcccaaccaatagaatagggtaaccttattcgggacactttcgtcatacatagtcagatatacaagcaatgtcactctccttcgtactcgtacatacaacacaactacattcaaa

SEQ ID NO: 194 - DNA, 1183 bp, Artificial sequence
  gpdT-pGPD
ctatccgaagatcaagagcgaagcaagttgtaagtccaggacatgtttcccgcccacgcgagtgatttataacacctctcttttttgacacccgctcgccttgaaattcatgtcacataaattatagtcaacgacgtttgaataacttgtcttgtagttcgatgatgatcatatgattacattaatagtaattactgtatggcgcgccggtagtcggaaagagccgggaccggccggcgagcataaaccggacgcagtaggatgtcctgcacgggtctttttgtggggtgtggagaaaggggtgcttggagatggaagccggtagaaccgggctgcttggggggatttggggccgctgggctccaaagaggggtaggcatttcgttggggttacgtaattgcggcatttgggtcctgcgcgcatgtcccattggtcagaattagtccggataggagacttatcagccaatcacagcgccggatccacctgtaggttgggttgggtgggagcacccctccacagagtagagtcaaacagcagcagcaacatgatagttgggggtgtgcgtgttaaaggaaaaaaaaagaagcttgggttatattcccgctctatttagaggttgcgggatagacgccgacggagggcaatggcgccatggaaccttgcggatatcgatacgccgcggcggactgcgtccgaaccagctccagcagcgttttttccgggccattgagccgactgcgaccccgccaacgtgtcttggcccacgcactcatgtcatgttggtgttgggaggccactttttaagtagcacaaggcacctagctcgcagcaaggtgtccgaaccaaagaagcggctgcagtggtgcaaacggggcggaaacggcgggaaaaagccacgggggcacgaattgaggcacgccctcgaatttgagacgagtcacggccccattcgcccgcgcaatggctcgccaacgcccggtcttttgcaccacatcaggttaccccaagccaaacctttgtgttaaaaagcttaacatattataccgaacgtaggtttgggcgggcttgctccgtctgtccaaggcaacatttatataagggtctgcatcgccggctcaattgaatcttttttcttcttctcttctctatattcattcttgaattaaacacacatcaaca

SEQ ID NO: 195 - DNA, 639 bp, Artificial sequence
  pgmT-pTEF
acttcgagctaatccagtagcttacgttacccaggggcaggtcaactggctagccacgagtctgtcccaggtcgcaatttagtgtaataaacaatatatatattgagtctaaagggaattgtagctattgtgattgtgtgattttcgtcttgctggttcttattgtgtcccattcgtttcatcctgatgaggacccctggcgtacgccggcgaagcttggtaccagagacgggttggcggcgtatttgtgtcccaaaaaacagccccaattgccccaattgaccccaaattgacccagtagcgggcccaaccccggcgagagcccccttcaccccacatatcaaacctcccccggttcccacacttgccgttaagggcgtagggtactgcagtctggaatctacgcttgttcagactttgtactagtttctttgtctggccatccgggtaacccatgccggacgcaaaatagactactgaaaatttttttgctttgtggttgggactttagccaagggtataaaagaccaccgtccccgaattacctttcctcttcttttctctctctccttgtcaactcacacccgaaatcgttaagcatttccttctgagtataagaatcattcgctagccacaaaa

SEQ ID NO: 196 - DNA, 1009 bp, Artificial sequence
  pgkT-pPGM
gctatttacagcatgtgtaatgaggaatataacgttgattgaattgtttgtgaaaaatgtagaaaatttcagtgaagttgtgttttctatatagtaagcacttttggtacaagtatctgcacatccctgcatgttacaagcctgatcatgcagggcaatattctgactataaatatacctcgatattttagcaagctatacgtacgtaccaaccacagattacgacccattcgcagtcacagttcactagggtttgggttgcatccgttgagagtggtttgtttttaaccttctccatgtgctcactcaggttttgggttcagatcaaatcaaggcgtgaaccactgtttgaggacaaatgtgacacaaccaaccagtgtcaggggcaagtccgtgacaaaggggaagatacaatgcaattactgacagttacggactgcctcgatgccctaaccttgccccaaaataagacaactgtcctcgtttaagcgcaaccctattcagcgtcacgtcataatagcgtttggatagcactagtctatgaggagcgttttatgttgcggtgagggcgattggtgctcatatgggttcaattgaggtggtggaacgagcttagtcttcaattgaggtgcgagcgacacaattgggtgtcacgtggcctaattgacctcggatcgtggagtccccagttatacagcaaccacgaggtgcatgagtaggagacgtcaccagacaatagggtttttttggactggagagggtagggcaaaagcgctcaacgggctgtttggggagctatgggggaggaattggcgatatttgtgaggttgacggctccgatttgcgtgttttgtcgcttctgcatctccccatacccatatcttccctccccacctctttccacgataattttacggatcagcaataaggttccttctcctagtttccacgtccatatatatctatgctgcgtcgtccttttcgtgacatcaccaaaacacatacaaaa

SEQ ID NO: 197 - DNA, 2472 bp, Artificial sequence
  LEU2 and flanking sequences
aaaattaacagatagtttgccggtgataattctcttaacctcccacactcctttgacataacgatttatgtaacgaaactgaaatttgaccagatattgttgtaaatagaaaatctggcttgtaggtggaaactagtaacggccgccagtgtgctggaattcggctccactgtcctccactacaaacacacccaatctgcttcttctagtcaaggttgctacaccggtaaattataaatcatcatttcattagcagggctgggccctttttatagagtcttatacactagcggaccctgccggtagaccaacccgcaggcgcgtcagtttgctccttccatcaatgcgtcgtagaaacgacttactccttcttgagcagctccttgaccttgttggcaacaaagtctccgacctcggaggtggaggaagagcctccgatatcggcggtagtgataccagcctcgacggactccttgacggcagcctcaacagcgtcaccggcgggcttcatgttaagagagaacttgagcatcatggcggcagacagaatggtggcaatggggttgaccttctgcttgccgagatcgggggcagatccgtgacagggctcgtacagaccgaacgcctcgttggtgtcgggcagagaagccagagaggcggagggcagcagacccagagaaccggggatgacggaggcctcgtcggagatgatatcgccaaacatgttggtggtgatgatgataccattcatcttggagggctgcttgatgaggatcatggcggccgagtcgatcagctggtggttgagctcgagctgggggaattcgtccttgaggactcgagtgacagtctttcgccaaagtcgagaggaggccagcacgttggccttgtcaagagaccacacgggaagaggggggttgtgctgaagggccaggaaggcggccattcgggcaattcgctcaacctcaggaacggagtaggtctcggtgtcggaagcgacgccagatccgtcatcctcctttcgctctccaaagtagatacctccgacgagctctcggacaatgatgaagtcggtgccctcaacgtttcggatgggggagagatcggcgagcttgggcgacagcagctggcagggtcgcaggttggcgtacaggttcaggtcctttcgcagcttgaggagaccctgctcgggtcgcacgtcggttcgtccgtcgggagtggtccatacggtgttggcagcgcctccgacagcaccgagcataatagagtcagcctttcggcagatgtcgagagtagcgtcggtgatgggctcgccctccttctcaatggcagctcctccaatgagtcggtcctcaaacacaaactcggtgccggaggcctcagcaacagacttgagcaccttgacggcctcggcaatcacctcggggccacagaagtcgccgccgagaagaacaatcttcttggagtcagtcttggtcttcttagtttcgggttccattgtggatgtgtgtggttgtatgtgtgatgtggtgtgtggagtgaaaatctgtggctggcaaacgctcttgtatatatacgcacttttgcccgtgctatgtggaagactaaacctccgaagattgtgactcaggtagtgcggtatcggctagggacccaaaccttgtcgatgccgatagcgctatcgaacgtaccccagccggccgggagtatgtcggaggggacatacgagatcgtcaagggtttgtggccaactggtaaataaatgatgactcaggcgacgacggaattcgacagcaactactcctttcaccaaccatgtgcattttagctcgaataacattcacaggcttggtgatctacatccatggtgtctggccgattaccgtggtgttttggcagtaacgagaatattgagtggactcttcccatcaccaataaagactcatactacaatcacgagcgcttcagctgccactatagtgttggtgacacaatacccctcgatgctgggcattactgtagcaagagatattatttcatggcgcatttttccagtctacctgactttttagtgtgatttcttctccacattttatgctcagtgtgaaaagttggagtgcacacttaattatcgccggttttcggaaagtactatgtgctcaaggttgcaccccacgttacgtatgcagcacattgagcagcctttggaccgtggagataacggtgtggagatagcaacgggtagtcttcgtaataagcaatgcagccgaattctgcagatatccatcacactggcggccgctcgagcatgcatctagatggcctccttggccgggtttcaattcaattcatcattttttttttattcttttttttgatttcggtttctttgaaatttttttgattcggtaatctccgaacagaaggaagaacgaaggaaggagcacagacttagattggtatatatacgca

SEQ ID NO: 198 - DNA, 6989 bp, Artificial sequence
  Vector sequences
ctagatggcctccttggccgggtttcaattcaattcatcattttttttttattcttttttttgatttcggtttctttgaaatttttttgattcggtaatctccgaacagaaggaagaacgaaggaaggagcacagacttagattggtatatatacgcatatgtagtgttgaagaaacatgaaattgcccagtattcttaacccaactgcacagaacaaaaacctgcaggaaacgaagataaatcatgtcgaaagctacatataaggaacgtgctgctactcatcctagtcctgttgctgccaagctatttaatatcatgcacgaaaagcaaacaaacttgtgtgcttcattggatgttcgtaccaccaaggaattactggagttagttgaagcattaggtcccaaaatttgtttactaaaaacacatgtggatatcttgactgatttttccatggagggcacagttaagccgctaaaggcattatccgccaagtacaattttttactcttcgaagacagaaaatttgctgacattggtaatacagtcaaattgcagtactctgcgggtgtatacagaatagcagaatgggcagacattacgaatgcacacggtgtggtgggcccaggtattgttagcggtttgaagcaggcggcagaagaagtaacaaaggaacctagaggccttttgatgttagcagaattgtcatgcaagggctccctatctactggagaatatactaagggtactgttgacattgcgaagagcgacaaagattttgttatcggctttattgctcaaagagacatgggtggaagagatgaaggttacgattggttgattatgacacccggtgtgggtttagatgacaagggagacgcattgggtcaacagtatagaaccgtggatgatgtggtctctacaggatctgacattattattgttggaagaggactatttgcaaagggaagggatgctaaggtagagggtgaacgttacagaaaagcaggctgggaagcatatttgagaagatgcggccagcaaaactaaaaaactgtattataagtaaatgcatgtatactaaactcacaaattagagcttcaatttaattatatcagttattacccgggaatctcggtcgtaatgatttttataatgacgaaaaaaaaaaaattggaaagaaaaccccccccccgcagcgttgggtcctggccacgggtgcgcatgatcgtgctcctgtcgttgaggacccggctaggctggcggggttgccttactggttagcagaatgaatcaccgatacgcgagcgaacgtgaagcgactgctgctgcaaaacgtctgcgacctgagcaacaacatgaatggtcttcggtttccgtgtttcgtaaagtctggaaacgcggaagtcagcgccctgcaccattatgttccggatctgcatcgcaggatgctgctggctaccctgtggaacacctacatctgtattaacgaagcgctggcattgaccctgagtgatttttctctggtcccgccgcatccataccgccagttgtttaccctcacaacgttccagtaaccgggcatgttcatcatcagtaacccgtatcgtgagcatcctctctcgtttcatcggtatcattacccccatgaacagaaattcccccttacacggaggcatcaagtgaccaaacaggaaaaaaccgcccttaacatggcccgctttatcagaagccagacattaacgcttctggagaaactcaacgagctggacgcggatgaacaggcagacatctgtgaatcgcttcacgaccacgctgatgagctttaccgcaggtgggccattctcatgaagaatatcttgaatttattgtcatattactagttggtgtggaagtccatatatcggtgatcaatatagtggttgacatgctggctagtcaacattgagccttttgatcatgcaaatatattacggtattttacaatcaaatatcaaacttaactattgactttataacttatttaggtggtaacattcttataaaaaagaaaaaaattactgcaaaacagtactagcttttaacttgtatcctaggttatctatgctgtctcaccatagagaatattacctatttcagaatgtatgtccatgattcgccgggtaaatacatataatacacaaatctggcttaataaagtctataatatatctcataaagaagtgctaaattggctagtgctatatatttttaagaaaatttcttttgactaagtccatatcgactttgtaaaagttcactttagcatacatatattacacgagccagaaattgtaacttttgcctaaaatcacaaattgcaaaatttaattgcttgcaaaaggtcacatgcttataatcaacttttttaaaaatttaaaatacttttttattttttatttttaaacataaatgaaataatttatttattgtttatgattaccgaaacataaaacctgctcaagaaaaagaaactgttttgtccttggaaaaaaagcactacctaggagcggccaaaatgccgaggctttcatagcttaaactctttacagaaaataggcattatagatcagttcgagttttcttattcttccttccggttttatcgtcacagttttacagtaaataagtatcacctcttagagttaactatgagataagcaagtatcatctcatttcatttacctgaagtcgagtaaacagaaaatccaattgttgatgaacctcaatgacttagaactatctatcggcagatcatataaagaggatttaggtacctagaggactgtacctggagtatatatatatatatatatatattatctcaactatagtccatagaggtttctttcttgaggccttaaactgctaaagaatgatattggtggaatgcaagcaccaatctctcttctttcgtaactgttcatatacttcaaaccaagaatgtaacgggcattgacccatccaaaaccttcagtagctgcccctttaaagtcagcaccttgattaccgtattctgcttcaacacgatgaggatctgttcctcttgtgacatcatatttttcaaccacaataccattataatcgacaaaagcctttgtcatcatgaaaagccatctataagctagcctattcgttacagttaaataaccataagaacggaggccttcccaagcaagaatttgatggggtgcccaaccaaatggatagtcccattgtctaattggtctcgaaatagaaattgggcctcgagaacgctccgtacatgcagctaaacctccaagcatctctaacttgggtagtgctttctccaccattttctgtgcttgctccttcgtggcaagtccagcccataatgcccagaatgtagttgcggattcgtatgacgttctgtgcttgatttttgtgttgtagtcaaagaaaaaccccgactcgtcatcccacatatatttggtaattgatgaggcaacgctaattatcaacatatagattgttatctatctgcatgaacacgaaatctttacttgacgacttgaggctgatggtgtttatgcaaagaaaccactgtgtttaatatgtgtcactgtttgatattactgtcagcgtagaagataatagtaaaagcggttaataagtgtatttgagataagtgtgataaagtttttacagcgaaaagacgataaatacaagaaaatgattacgaggatacggagagaggtatgtacatgtgtatttatatactaagctgccggcggttgtttgcaagaccgagaaaaggctagcaagaatcgggtcattgtagcgtatgcgcctgtgaacattctcttcaacaagtttgattccattgcggtgaaatggtaaaagtcaaccccctgcgatgtatattttcctgtacaatcaatcaaaaagccaaatgatttagcattatctttacatcttgttattttacagattttatgtttagatcttttatgcttgcttttcaaaaggcctgcaggcaagtgcacaaacaatacttaaataaatactactcagtaataacctatttcttagcatttttgacgaaatttgctattttgttagagtcttttacaccatttgtctccacacctccgcttacatcaacaccaataacgccatttaatctaagcgcatcaccaacattttctggcgtcagtccaccagctaacataaaatgtaagctctgcctcgcgcgtttcggtgatgacggtgaaaacctctgacacatgcagctcccggagacggtcacagcttgtctgtaagcggatgccgggagcagacaagcccgtcagggcgcgtcagcgggtgttggcgggtgtcggggcgcagccatgacccagtcacgtagcgatagcggagtgtatactggcttaactatgcggcatcagagcagattgtactgagagtgcaccatatgcggtgtgaaataccgcacagatgcgtaaggagaaaataccgcatcaggcgctcttccgcttcctcgctcactgactcgctgcgctcggtcgttcggctgcggcgagcggtatcagctcactcaaaggcggtaatacggttatccacagaatcaggggataacgcaggaaagaacatgtgagcaaaaggccagcaaaaggccaggaaccgtaaaaaggccgcgttgctggcgtttttccataggctccgcccccctgacgagcatcacaaaaatcgacgctcaagtcagaggtggcgaaacccgacaggactataaagataccaggcgtttccccctggaagctccctcgtgcgctctcctgttccgaccctgccgcttaccggatacctgtccgcctttctcccttcgggaagcgtggcgctttctcatagctcacgctgtaggtatctcagttcggtgtaggtcgttcgctccaagctgggctgtgtgcacgaaccccccgttcagcccgaccgctgcgccttatccggtaactatcgtcttgagtccaacccggtaagacacgacttatcgccactggcagcagccactggtaacaggattagcagagcgaggtatgtaggcggtgctacagagttcttgaagtggtggcctaactacggctacactagaaggacagtatttggtatctgcgctctgctgaagccagttaccttcggaaaaagagttggtagctcttgatccggcaaacaaaccaccgctggtagcggtggtttttttgtttgcaagcagcagattacgcgcagaaaaaaaggatctcaagaagatcctttgatcttttctacggggtctgacgctcagtggaacgaaaactcacgttaagggattttggtcatgagattatcaaaaaggatcttcacctagatccttttaaattaaaaatgaagttttaaatcaatctaaagtatatatgagtaaacttggtctgacagttaccaatgcttaatcagtgaggcacctatctcagcgatctgtctatttcgttcatccatagttgcctgactccccgtcgtgtagataactacgatacgggagggcttaccatctggccccagtgctgcaatgataccgcgagacccacgctcaccggctccagatttatcagcaataaaccagccagccggaagggccgagcgcagaagtggtcctgcaactttatccgcctccatccagtctattaattgttgccgggaagctagagtaagtagttcgccagttaatagtttgcgcaacgttgttgccattgctgcaggcatcgtggtgtcacgctcgtcgtttggtatggcttcattcagctccggttcccaacgatcaaggcgagttacatgatcccccatgttgtgcaaaaaagcggttagctccttcggtcctccgatcgttgtcagaagtaagttggccgcagtgttatcactcatggttatggcagcactgcataattctcttactgtcatgccatccgtaagatgcttttctgtgactggtgagtactcaaccaagtcattctgagaatagtgtatgcggcgaccgagttgctcttgcccggcgtcaacacgggataataccgcgccacatagcagaactttaaaagtgctcatcattggaaaacgttcttcggggcgaaaactctcaaggatcttaccgctgttgagatccagttcgatgtaacccactcgtgcacccaactgatcttcagcatcttttactttcaccagcgtttctgggtgagcaaaaacaggaaggcaaaatgccgcaaaaaagggaataagggcgacacggaaatgttgaatactcatactcttcctttttcaatattattgaagcatttatcagggttattgtctcatgagcggatacatatttgaatgtatttagaaaaataaacaaataggggtttccgcgcacatttccccgaaaagtgccacctgacgtctaagaaaccattattatcatgacattaacctataaaaataggcgtatcacgaggccctttcgtcttggccacctaggccggccttcccggaagtatatactaattcattccttgaatatttatgaaaagcaacatgtgtatttcttgtgtgtgcggcaaacgtagcaattgcaactgcataaacgatgattgtaaaagtatcacactttgctcagacaggttagattcacctggtacgagggcagtgtcttaaaggttccatctacctcggcccttgtttcttgaagagtggtcaatatgtgttttatacagctgaaatttcccctgtatgttgagatcgtgtatattggtcataatctgggctctttagtcgatcccagttttctcgggcaagtttttttctccacaaagtaccgctggaaaactctatgtgacttgttgacagattacttgggttatctgcgggatatgtcttggataggcaaccgggcatatatcaccgggcggactgttggttctgtac

SEQ ID NO: 199 - DNA, 1170 bp, Artificial sequence
  pENO
tcgggcaagtttttttctccacaaagtaccgctggaaaactctatgtgacttgttgacagattacttgggttatctgcgggatatgtcttggataggcaaccgggcatatatcaccgggcggactgttggttctgtacgtacatacagcactttgagctcatgtctcacacgcaaccatggtgcgtggaggctttggcatcctttctacttgtagtggctatagtacttgcagtccaagcaaacatgagtatgtgcttgtatgtactgaaacccgtctacggtaatattttagagtgtggaactatgggatgagtgctcattcgatactatgttgtcacccgatttgccgtttgcgaggtaagacacattcggtggttcaggcggctacttgtatgtagcatccacgttcatgttttgtggatcagattaatggtatggatatgcacggggcgtttccccggtaacgtgtaggcagtccagtgcaacccagacagctgagctctctatagccgtgcgtgtgcggtcatatcacgctacacttagctacagaataaagctcggtagcgccaacagcgttgacaaatagctcaagggcgtggagcacagggtttaggaggttttaatgggcgagaaggcgcgtagatgtagtcttcctcggtcccatcggtaatcacgtgtgtgccgatttgcaagacgaaaagccacgagaataaaccgggagaggggatggaagtccccgaacagcaaccagcccttgccctcgtggacataacctttcacttgccagaactctaagcgtcaccacggtatacaagcgcacgtagaagattgtggaagtcgtgttggagactgttgatttgggcggtggaggggggtatttgagagcaagtttgagatttgtgccattgagggggaggttattgtggccatgcagtcggatttgccgtcacgggaccgcaacatgcttttcattgcagtccttcaactatccatctcacctcccccaatggcttttaactttcgaatgacgaaagcacccccctttgtacagatgactatttgggaccaatccaatagcgcaattgggtttgcatcatgtataaaaggagcaatcccccactagttataaagtcacaagtatctcagtatacccgtctaaccacacattt

SEQ ID NO: 200 - DNA, 2276 bp, Artificial sequence
  HPH
aaattaacagatagtttgccggtgataattctcttaacctcccacactcctttgacataacgatttatgtaacgaaactgaaatttgaccagatattgttgtaaatagaaaatctggcttgtaggtggcaaactagtaacggccgccagtgtgctggaattgaatatttaccgttcgtataatgtatgctatacgaagttataccggtctcgtagtgttcacgttcagttcacggtgagcttaaaactatcttcaagaagagatttgagacctgatttatacttgcagcaatgtttacttcttatcgcgatacacgaatgtgatacggatcaaagtaagcaggactacgataagataacgaatgcggtgcagtccatgtcgattaggtatagatacatttattttgtgttatgttacattttggggggatactgtcctacttgtagtacctacttgtagtggcgcgtctattcctttgccctcggacgagtgctggggcgtcggtttccactatcggcgagtacttctacacagccatcggtccagacggccgcgcttctgcgggcgatttgtgtacgcccgacagtcccggctccggatcggacgattgcgtcgcatcgaccctgcgcccaagctgcatcatcgaaattgccgtcaaccaagctctgatagagttggtcaagaccaatgcggagcatatacgcccggagccgcggcgatcctgcaagctccggatgcctccgctcgaagtagcgcgtctgctgctccatacaagccaaccacggcctccagaagaagatgttggcgacctcgtattgggaatccccgaacatcgcctcgctccagtcaatgaccgctgttatgcggccattgtccgtcaggacattgttggagccgaaatccgcgtgcacgaggtgccggacttcggggcagtcctcggcccaaagcatcagctcatcgagagcctgcgcgacggacgcactgacggtgtcgtccatcacagtttgccagtgatacacatggggatcagcaatcgcgcatatgaaatcacgccatgtagtgtattgaccgattccttgcggtccgaatgggccgaacccgctcgtctggctaagatcggccgcagcgatcgcatccatggcctccgcgaccggctgcagaacagcgggcagttcggtttcaggcaggtcttgcaacgtgacaccctgtgcacggcgggagatgcaataggtcaggctctcgctgaattccccaatgtcaagcacttccggaatcgggagcgcggccgatgcaaagtgccgataaacataacgatctttgtagaaaccatcggcgcagctatttacccgcaggacatatccacgccctcctacatcgaagctgaaagcacgagattcttcgccctccgagagctgcatcaggtcggagacgctgtcgaacttttcgatcagaaacttctcgacagacgtcgcggtgagttcaggctttttcatatgggtacctgagaacatttttgtgtctaggtgtttgtgtttggactgcgatcagtgaagaaaagaagaggaaaaattgtgcaagaaattttgctttcaagacttggctgatgcagcagggtaactctgggacacagacctatgtttgtggttaaactcaatgcacgtggtacgtgcgtggagcgcttacccatccaagggtgtggacatggaaccgacggtccgtggagttgtgtaatgtcattttggcgactcttgaagcaaggctataaaaaaattgtgtggcttgagtcttatcgagctcggtcactacaagagttaatcttcctgtctcaggcagacaggtcaggcagggttacttttgggtgtgctgtaactcactgtatggccgttagtgcgcatagacgttgtacatactggaccgaattgtagcgtgctcaatagggccaataaagctattgtagggatccataacttcgtataatgtatgctatacgaacggtacccgggcaattctgcagatatccatcacactggcggccgctcgagcatgcatctagatggcctccttggccgggtttcaattcaattcatcattttttttttattcttttttttgatttcggtttctttgaaatttttttgattcggtaatctccgaacagaaggaagaacgaaggaaggagcacagacttagattggtatatatacgcatatgtagtgttgaagaaacatgaaattgcccagtattcttaacccaactgcacagaacaaaaacctgca

SEQ ID NO: 201 - DNA, 600 bp, Artificial sequence
  Sc Eno2.promoter
gtgtcgacgctgcgggtatagaaagggttctttactctatagtacctcctcgctcagcatctgcttcttcccaaagatgaacgcggcgttatgtcactaacgacgtgcaccaacttgcggaaagtggaatcccgttccaaaactggcatccactaattgatacatctacacaccgcacgccttttttctgaagcccactttcgtggactttgccatatgcaaaattcatgaagtgtgataccaagtcagcatacacctcactagggtagtttctttggttgtattgatcatttggttcatcgtggttcattaattttttttctccattgctttctggctttgatcttactatcatttggatttttgtcgaaggttgtagaattgtatgtgacaagtggcaccaagcatatataaaaaaaaaaagcattatcttcctaccagagttgattgttaaaaacgtatttatagcaaacgcaattgtaattaattcttattttgtatcttttcttcccttgtctcaatcttttatttttattttatttttcttttcttagtttctttcataacaccaagcaactaatactataacatacaataata

SEQ ID NO: 202 - DNA, 600 bp, Artificial sequence
  Sc Fba1.promoter
ctacttggcttcacatacgttgcatacgtcgatatagataataatgataatgacagcaggattatcgtaatacgtaatagttgaaaatctcaaaaatgtgtgggtcattacgtaaataatgataggaatgggattcttctatttttcctttttccattctagcagccgtcgggaaaacgtggcatcctctctttcgggctcaattggagtcacgctgccgtgagcatcctctctttccatatctaacaactgagcacgtaaccaatggaaaagcatgagcttagcgttgctccaaaaaagtattggatggttaataccatttgtctgttctcttctgactttgactcctcaaaaaaaaaaaatctacaatcaacagatcgcttcaattacgccctcacaaaaacttttttccttcttcttcgcccacgttaaattttatccctcatgttgtctaacggatttctgcacttgatttattataaaaagacaaagacataatacttctctatcaatttcagttattgttcttccttgcgttattcttctgttcttctttttcttttgtcatatataaccataaccaagtaatacatattcaaa

SEQ ID NO: 203 - DNA, 600 bp, Artificial sequence
  Sc Tef1.promoter
ttggctgataatagcgtataaacaatgcatactttgtacgttcaaaatacaatgcagtagatatatttatgcatattacatataatacatatcacataggaagcaacaggcgcgttggacttttaattttcgaggaccgcgaatccttacatcacacccaatcccccacaagtgatcccccacacaccatagcttcaaaatgtttctactccttttttactcttccagattttctcggactccgcgcatcgccgtaccacttcaaaacacccaagcacagcatactaaatttcccctctttcttcctctagggtgtcgttaattacccgtactaaaggtttggaaaagaaaaaagacaccgcctcgtttctttttcttcgtcgaaaaaggcaataaaaatttttatcacgtttctttttcttgaaaatttttttttttgatttttttctctttcgatgacctcccattgatatttaagttaataaacggtcttcaatttctcaagtttcagtttcatttttcttgttctattacaactttttttacttcttgctcattagaaagaaagcatagcaatctaatctaagttttaattacaaa

SEQ ID NO: 204 - DNA, 600 bp, Artificial Sequence
  Sc Pgk1.promoter
gggccagaaaaaggaagtgtttccctccttcttgaattgatgttaccctcataaagcacgtggcctcttatcgagaaagaaattaccgtcgctcgtgatttgtttgcaaaaagaacaaaactgaaaaaacccagacacgctcgacttcctgtcttcctattgattgcagcttccaatttcgtcacacaacaaggtcctagcgacggctcacaggttttgtaacaagcaatcgaaggttctggaatggcgggaaagggtttagtaccacatgctatgatgcccactgtgatctccagagcaaagttcgttcgatcgtactgttactctctctctttcaaacagaattgtccgaatcgtgtgacaacaacagcctgttctcacacactcttttcttctaaccaagggggtggtttagtttagtagaacctcgtgaaacttacatttacatatatataaacttgcataaattggtcaatgcaagaaatacatatttggtcttttctaattcgtagtttttcaagttcttagatgctttctttttctcttttttacagatcatcaaggaagtaattatctactttttacaacaaatataaaaca

SEQ ID NO: 205 - DNA, 1001 bp, Artificial sequence
  Kl prom 12.pro
cgtaaaaactaaaacgagcccccaccaaagaacaaaaaagaaggtgctgggcccccactttcttcccttgcacgtgataggaagatggctacagaaacaagaagatggaaatcgaaggaaagagggagactggaagctgtaaaaactgaaatgaaaaaaaaaaaaaaaaaaaaaaaacaagaagctgaaaatggaagactgaaatttgaaaaatggtaaaaaaaaaaaagaaacacgaagctaaaaacctggattccattttgagaagaagcaagaaaggtaagtatggtaacgaccgtacaggcaagcgcgaaggcaaatggaaaagctggagtccggaagataatcatttcatcttcttttgttagaacagaacagtggatgtccctcatctcggtaacgtattgtccatgccctagaactctctgtccctaaaaagaggacaaaaacccaatggtttccccagcttccagtggagccaccgatcccactggaaaccactggacaggaagagaaaatcacggacttcctctattgaaggataattcaacactttcaccagatcccaaatgtcccgcccctattcccgtgttccatcacgtaccataacttaccatttcatcacgttctctatggcacactggtactgcttcgactgctttgcttcatcttctctatgggccaatgagctaatgagcacaatgtgctgcgaaataaagggatatctaatttatattattacattataatatgtactagtgtggttattggtaattgtacttaattttgatatataaagggtggatctttttcattttgaatcagaattggaattgcaacttgtctcttgtcactattacttaatagtaattatatttcttattaaccttttttttaagtcaaaacaccaaggacaagaactactcttcaaaggtatttcaagttatcatacgtgtcacacacgcttcacagtttcaagtaaaaaaaaagaatattacaca

SEQ ID NO: 206 - DNA, 403 bp, Artificial sequence
  Ag lox_TEF1.promoter
taccgttcgtataatgtatgctatacgaagttatgtccccgccgggtcacccggccagcgacatggaggcccagaataccctccttgacagtcttgacgtgcgcagctcaggggcatgatgtgactgtcgcccgtacatttagcccatacatccccatgtataatcatttgcatccatacattttgatggccgcacggcgcgaagcaaaaattacggctcctcgctgcagacctgcgagcagggaaacgctcccctcacagacgcgttgaattgtccccacgccgcgcccctgtagagaaatataaaaggttaggatttgccactgaggttcttctttcatatacttccttttaaaatcttgctaggatacagttctcacatcacatccgaacataaacaaca

SEQ ID NO: 207 - DNA, 1000 bp, Artificial sequence
  Kl prom 6.pro
caaagggggggcagggacagggatacgacaagggctggggaaaaaaaaaaagatagatacgattggccgggtaagcctggggaaatgtagcaagtgcgggtaagttaaaaggtaaccacgtgactccggaagagtcacgtggttacggacttttttctctagatctcagctttttatcggtcttaccctgccctcctgccccctgccccttccctttgccccaaaaagaaaggaaatctgttggatttcgctcaggccatccctttcgttaatatcggttatcgctttacacactgcacatccttctgtccaaaaggaatccagaagtttagcttttccttcctttcccacagacattagcctaggccctctctcatcatttgcatgcctcagccaatgtaccaagaataacgcaacgaggttgggaaattttaacccaacaatcgatgcagatgtgacaagagattagacacgttccagataccagattacacagcttgtgctagcagagtgacatatggtggtgttgtgtctcgtttagtacctgtaatcgagagtgttcaaatcagtcgatttgaacacccttactgccactgaatattgattgaataccgtttattgaaggttttatgagtgatcttctttcggtccaggacaatttgttgagctttttctatgtagagttccgtcccttttttttttttttttgctttctcgcacttactagcactatttttttttcacacactaaaacactttattttaatctatatatatatatatatatatatgtaggaatggaatcacagacatttgatactcatcctcatccttattaattcttgttttaatttgtttgacttagccaaaccaccaatctcaacccatcgtatttcaggtattgtgtgtctagtgtgtctctggtatacggaaataagtgccagaagtaaggaagaaacaaagaacaagtgtctgaatactactagcctctcttttcata

SEQ ID NO: 208 - DNA, 600 bp, Artificial sequence
  Sc Pma1.pro
ccatcatgaaaaatctctcgacaccgtttatccattgcttttttgttgtctttttccctcgttcacagaaagtctgaagaagctatagtagaactatgagctttttttgtttctgttttccttttttttttttttacctctgtggaaattgttactctcacactctttagttcgtttgtttgttttgtttattccaattatgaccggtgacgaaacgtggtcgatggtgggtaccgcttatgctcccctccattagtttcgattatataaaaaggccaaatattgtattattttcaaatgtcctatcattatcgtctaacatctaatttctcttaaattttttctctttctttcctataacaccaatagtgaaaatctttttttcttctatatctacaaaaactttttttttctatcaacctcgttgataaattttttctttaacaatcgttaataattaattaattggaaaataaccattttttctctcttttatacacacattcaaaagaaagaaaaaaaatataccccagctagttaaagaaaatcattgaaaagaataagaagataagaaagatttaattatcaaacaatatcaaa

SEQ ID NO: 209 - DNA, 600 bp, Artificial sequence
  Sc Vps68.promoter
gatatagccgctacgactgattagtgatgtgataaagatagaagatttaagtcacagaggcgtgcatctacgattttggcgtttcacattttttacacttaaattttagtgatctagccgtgaccttggcagcagtttccaaaatcattccatgaccatgtcatgcttaagaacgttagacccagaacaagtggacctgtattctaactcttcactcttgggcaaagataatagtattatcttttaccccattttttgtatgttttttcgtttattgagtttggcgtttcctatttagaaatagtacaatccggtcaatcattcgatagtgaaatatatatatttaactaggaaaattagtaaaacctcatttaaagatcattcaccttgatatatactactattgaccttttgttaatgaccattttcgtaaaaatgaactgcgattctcttctggaatttgttaccctaccttattcactaaatcagaaataataatgtgcagcgcccctttcataaagaaggcaagtatagggcatatagttaaaggtcagaactctttatccccaactacaagatcaattagaaaatcacatcata

SEQ ID NO: 210 - DNA, 600 bp, Artificial sequence
  Sc Oye2.promoter
actacaatttagcggcttagcacaatacgcgttttcaacttcctacgctagcgatgacaaaatgtctccaagaggcggaacttgcgacggatgcatggaaatatcttacgtaatgaacttccgtaatgaacttccgtaattcaagatctcttagcatctcttgttcaatcttcagactctactaagtgttcttaccaaccattggatgctcattacaaatgaatgaatatattgcacggaacggaagcggcatgctttttccgtgtcgtgtgcttagtaaagcaaaacggagtagaatcggtaagaacttcctttttgggttggaaaatcattgccattgtttggacacctttctttttccgtattgttcgagcaccgcgtttctttttgggtacttgatgaggtagcagattcctggaacgtgctttctctcgaggtaacctgccttgttcctcctggtgactttctaaaatataaaaggaaaagcatatctctagtttcgagttttttcttcatactttatttccttatgttaaacggtccagatatagaataaatcatcatattaagctaaatatagacgataatatagtatcgata

SEQ ID NO: 211 - DNA, 810 bp, Artificial sequence
  KANMX
atgggtaaggaaaagactcacgtttcgaggccgcgattaaattccaacatggatgctgatttatatgggtataaatgggctcgcgataatgtcgggcaatcaggtgcgacaatctatcgattgtatgggaagcccgatgcgccagagttgtttctgaaacatggcaaaggtagcgttgccaatgatgttacagatgagatggtcagactaaactggctgacggaatttatgcctcttccgaccatcaagcattttatccgtactcctgatgatgcatggttactcaccactgcgatccccggcaaaacagcattccaggtattagaagaatatcctgattcaggtgaaaatattgttgatgcgctggcagtgttcctgcgccggttgcattcgattcctgtttgtaattgtccttttaacagcgatcgcgtatttcgtttggctcaggcgcaatcacgaatgaataacggtttggttgatgcgagtgattttgatgacgagcgtaatggctggcctgttgaacaagtctggaaagaaatgcataagcttttgccattctcaccggattcagtcgtcactcatggtgatttctcacttgataaccttatttttgacgaggggaaattaataggttgtattgatgttggacgagtcggaatcgcagaccgataccaggatcttgccatcctatggaactgcctcggtgagttttctccttcattacagaaacggctttttcaaaaatatggtattgataatcctgatatgaataaattgcagtttcatttgatgctcgatgagtttttctaa

SEQ ID NO: 212 - DNA, 301 bp, Artificial sequence
  Adh1.Terminator
agcgaatttcttatgatttatgatttttattattaaataagttataaaaaaaataagtgtatacaaattttaaagtgactcttaggttttaaaacgaaaattcttattcttgagtaactctttcctgtaggtcaggttgctttctcaggtatagcatgaggtcgctcttattgaccacacctctaccggcatgccgagcaaatgcctgcaaatcgctccccatttcacccaattgtagatatgctaactccagcaatgagttgatgaatctcggtgtgtattttatgtcctcagaggacaa

SEQ ID NO: 213 - DNA, 301 bp, Artificial sequence
  Adh2.terminator
agcggatctcttatgtctttacgatttatagttttcattatcaagtatgcctatattagtatatagcatctttagatgacagtgttcgaagtttcacgaataaaagataatattctactttttgctcccaccgcgtttgctagcacgagtgaacaccatccctcgcctgtgagttgtacccattcctctaaactgtagacatggtagcttcagcagtgttcgttatgtacggcatcctccaacaaacagtcggttatagtttgtcctgctcctctgaatcgtgtccctcgatatttctcat

SEQ ID NO: 214 - DNA, 301 bp, Artificial sequence
  Gmp1.Terminator
agtctgaagaatgaatgatttgatgatttctttttccctccatttttcttactgaatatatcaatgatatagacttgtatagtttattatttcaaattaagtagctatatatagtcaagataacgtttgtttgacacgattacattattcgtcgacatcttttttcagcctgtcgtggtagcaatttgaggagtattattaattgaataggttcattttgcgctcgcataaacagttttcgtcagggacagtatgttggaatgagtggtaattaatggtgacatgacatgttatagcaata

SEQ ID NO: 215 - DNA, 301 bp, Artificial sequence
  Sc Tal1.Terminator
aggaagtatctcggaaatattaatttaggccatgtccttatgcacgtttcttttgatacttacgggtacatgtacacaagtatatctatatatataaattaatgaaaatcccctatttatatatatgactttaacgagacagaacagttttttattttttatcctatttgatgaatgatacagtttcttattcacgtgttatacccacaccaaatccaatagcaataccggccatcacaatcactgtttcggcagcccctaagatcagacaaaacatccggaaccaccttaaatcaacgtc

SEQ ID NO: 216 - DNA, 301 bp, Artificial sequence
  Sc Tpi1.terminator
agattaatataattatataaaaatattatcttcttttctttatatctagtgttatgtaaaataaattgatgactacggaaagcttttttatattgtttctttttcattctgagccacttaaatttcgtgaatgttcttgtaagggacggtagatttacaagtgatacaacaaaaagcaaggcgctttttctaataaaaagaagaaaagcatttaacaattgaacacctctatatcaacgaagaatattactttgtctctaaatccttgtaaaatgtgtacgatctctatatgggttactca

SEQ ID NO: 217 - DNA, 285 bp, Artificial sequence
  Ag Tef1_lox.terminator
atcagtactgacaataaaaagattcttgttttcaagaacttgtcatttgtatagtttttttatattgtagttgttctattttaatcaaatgttagcgtgatttatattttttttcgcctcgacatcatctgcccagatgcgaagttaagtgcgcagaaagtaatatcatgcgtcaatcgtatgtgaatgctggtcgctatactgctgtcgattcgatactaacgccgccatccagtgtcgaaaacgagctcataacttcgtataatgtatgctatacgaacggta

SEQ ID NO: 218 - DNA, 301 bp, Artificial sequence
  Sc Pdc1.terminator
agcgatttaatctctaattattagttaaagttttataagcatttttatgtaacgaaaaataaattggttcatattattactgcactgtcacttaccatggaaagaccagacaagaagttgccgacagtctgttgaattggcctggttaggcttaagtctgggtccgcttctttacaaatttggagaatttctcttaaacgatatgtatattcttttcgttggaaaagatgtcttccaaaaaaaaaaccgatgaattagtggaaccaaggaaaaaaaaagaggtatccttgattaaggaaca

SEQ ID NO: 219 - DNA, 301 bp, Artificial sequence
  Sc Tdh1.terminator
aataaagcaatcttgatgaggataatgatttttttttgaatatacataaatactaccgtttttctgctagattttgtgaagacgtaaataagtacatattactttttaagccaagacaagattaagcattaactttacccttttctcttctaagtttcaatactagttatcactgtttaaaagttatggcgagaacgtcggcggttaaaatatattaccctgaacgtggtgaattgaagttctaggatggtttaaagatttttcctttttgggaaataagtaaacaatatattgctgcctt

SEQ ID NO: 220 - DNA, 301 bp, Artificial sequence
  Sc Eno1.terminator
aagcttttgattaagccttctagtccaaaaaacacgtttttttgtcatttatttcattttcttagaatagtttagtttattcattttatagtcacgaatgttttatgattctatatagggttgcaaacaagcatttttcattttatgttaaaacaatttcaggtttaccttttattctgcttgtggtgacgcgtgtatccgcccgctcttttggtcacccatgtatttaattgcataaataattcttaaaagtggagctagtctatttctatttacatacctctcatttctcatttcctcc

SEQ ID NO: 221 - DNA, 1000 bp, Artificial Sequence
  Kl prom 3.pro
gagcctgtccaagcaaatgccttctcataaatggtgccaaagacccgcaagcccaaagcaattaccccccaaaaagaaatgatatagtgcaagatacgtatatgaccatgacttgactaggtgaaacagtgcagaaacagccgcacaaaagcagccctaaccctcagagtcgattttactctttcaggtaataaagcctcgacatcaattttagacagaagccaggctggcctcgagattatagccataggcaagcaagaggagagaaggggaggccccccatggggggcctcccccccgctgtcaaggtttggcagaacctagcttcattaggccactagcccagcctaaaacgtcaacgggcaggaggaacactcccacaagacggcgtagtattctcgattcataaccattttctcaatcgaattacacagaacacaccgtacaaacctctctatcataactacttaatagtcacacacgtactcgtctaaatacacatcatcgtcctacaagttcatcaaagtgttggacagacaactataccagcatggatctcttgtatcggttcttttctcccgctctctcgcaataacaatgaacactgggtcaatcatagcctacacaggtgaacagagtagcgtttatacagggtttatacggtgattcctacggcaaaaatttttcatttctaaaaaaaaaaagaaaaatttttctttccaacgctagaaggaaaagaaaaatctaattaaattgatttggtgattttctgagagttccctttttcatatatcgaattttgaatataaaaggagatcgaaaaaatttttctattcaatctgttttctggttttatttgatagtttttttgtgtattattattatggattagtactggtttatatgggtttttctgtataacttctttttattttagtttgtttaatcttattttgagttacattatagttccctaactgcaagagaagtaacattaaaa

SEQ ID NO: 222 - DNA, 1000 bp, Artificial sequence; identical to SEQ ID NO: 221
  Kl prom 2.pro

SEQ ID NO: 223 - DNA, 600 bp, Artificial sequence
  Sc PRE3.promoter
caaacattaatttgttctgcatactttgaacctttcagaaaataaaaaacattacgcgcatacttaccctgctcgcgaagaagagtaacactaacgcattctatgggcaattgaagacagtattcagtacaagacatagtccgtttccttgagtcaattcctatagcattatgaactagccgcctttaagagtgccaagctgttcaacaccgatcatttttgatgatttggcgtttttgttatattgatagatttcttttgaattttgtcattttcacttttccactcgcaacggaatccggtggcaaaaaagggaaaagcattgaaatgcaatctttaacagtattttaaacaagttgcgacacggtgtacaattacgataagaattgctacttcaaagtacacacagaaagttaacatgaatggaattcaagtggacatcaatcgtttgaaaaagggcgaagtcagtttaggtacctcaatgtatgtatataagaatttttcctcccactttattgtttctaaaagttcaatgaagtaaagtctcaattggccttattactaactaataggtatcttataatcacctaataaaataga

SEQ ID NO: 224 - DNA, 600 bp, Saccharomyces cerevisiae; identical to SEQ ID NO: 209

SEQ ID NO: 225 - DNA, 600 bp, Saccharomyces cerevisiae; identical to SEQ ID NO: 210
